(19) United States
(12) Patent Application Publication
(10) Pub. No.: US 2025/0109446 A1
(43) Pub. Date: Apr. 3, 2025

(54) COMPOSITIONS AND METHODS FOR ONCOLOGY ASSAYS

(71) Applicant: LIFE TECHNOLOGIES CORPORATION, Carlsbad, CA (US)

(72) Inventors: Jian GU, Austin, TX (US); Jeoffrey J. SCHAGEMAN, Austin, TX (US); Paul D. WILLIAMS, Ann Arbor, MI (US); Andrew G. HATCH, Oceanside, CA (US); Na LI, Foster City, CA (US)

(21) Appl. No.: 18/947,344

(22) Filed: Nov. 14, 2024

Related U.S. Application Data
(63) Continuation of application No. PCT/US2023/067066, filed on May 16, 2023.
(60) Provisional application No. 63/342,867, filed on May 17, 2022.

(51) Int. Cl. C12Q 1/6886; C12Q 1/6806; C12Q 1/686

(52) U.S. Cl. CPC C12Q 1/6886; C12Q 1/6806; C12Q 1/686; C12Q 2600/156; C12Q 2600/16

(57) ABSTRACT

Provided are methods and compositions for preparing a library of target nucleic acid sequences that are useful for assessing gene mutations for oncology biomarker profiling of samples. In particular, a target-specific primer panel is provided that allows for selective amplification of oncology biomarker target sequences in a sample. In one aspect, the invention relates to target-specific primers useful for selective amplification of one or more target sequences associated with oncology biomarkers from two or more sample types. In some aspects, amplified target sequences obtained using the disclosed methods, and compositions can be used in various processes including nucleic acid sequencing and used to detect the presence of genetic variants of one or more targeted sequences associated with oncology.

### CROSS-REFERENCE TO RELATED APPLICATIONS

[0001] This application is a continuation of International Application No. PCT/US2023/067066, filed May 16, 2023, which in turn claims priority to and the benefit under 35 U.S.C. § 119(e) of U.S. Provisional Application No. 63/342,867, filed May 17, 2022, which is incorporated herein by reference in its entirety.

### SEQUENCE LISTING

[0002] This application hereby incorporates by reference the material of the electronic Sequence Listing filed concurrently herewith. The nucleic and amino acid sequences listed in the accompanying sequence listing are shown using standard letter abbreviations for nucleotide bases, and single letter code for amino acids, as defined in 37 C.F.R. 1.822. Only one strand of each nucleic acid sequence is shown, but the complementary strand is understood as included by any reference to the displayed strand. The material in the electronic Sequence Listing is submitted as an Extensible Markup Language (.xml) file entitled “TP109605WO1_ST26V2” created on Dec. 19, 2024, which has a file size of ˜8,086,871 bytes, and is herein incorporated by reference in its entirety.

### FIELD

[0003] This disclosure relates to compositions and methods of preparing a library of target nucleic acids and uses therefor.

### BACKGROUND

[0004] Advances in cancer therapies have started to provide promising results across oncology. Targeted therapies, immune checkpoint inhibitors, cancer vaccines and T-cell therapies have shown sustainable results in responsive populations over conventional chemotherapies. However, effective identification of responsive candidates and/or monitoring response has proven challenging. The need of a better understanding of the tumor microenvironment, tumor evolution and drug response biomarkers is immediate. Higher-throughput, systematic and standardized assay solutions that can efficiently and effectively detect multiple relevant biomarkers in a variety of sample types are desirable.

### SUMMARY

[0005] In one aspect of the invention compositions are provided for a single stream multiplex determination of actionable oncology biomarkers in a sample. In some embodiments the composition consists of a plurality of primer reagents directed to a plurality of target sequences to rapidly and effectively detect low level targets in the sample. Provided compositions target oncology gene sequences wherein the plurality of gene sequences are selected from targets among DNA hotspot mutation genes, copy number variation (CNV) genes, inter-genetic fusion genes, and intra-genetic fusion genes. In certain embodiments target genes are selected from the genes of Table 1. In particular embodiments the target genes consist of the genes of Table 1. Provided compositions maximize detection of key biomarkers, e.g., EGFR, ALK, BRAF, ROS1, HER2, MET, NTRK, and RET from a variety of samples (e.g., FFPE tissue, plasma) in a single-day in an integrated and automated workflow.

[0006] In some embodiments the plurality of actionable target genes in a sample determines a change in oncology activity in the sample indicative of a potential diagnosis, prognosis, candidate therapeutic regimen, and/or adverse event. In particular embodiments, provided compositions include a plurality of primer reagents selected from Table A. In some embodiments a multiplex assay comprising compositions of the invention is provided. In some embodiments a test kit comprising compositions of the invention is provided.

[0007] In another aspect of the invention, methods are provided for determining actionable oncology biomarkers in a biological sample. Such methods comprise performing multiplex amplification of a plurality of target sequences from a biological sample containing target sequences. Amplification comprises contacting at least a portion of the sample comprising multiple target sequences of interest using a plurality of target-specific primers in the presence of a polymerase under amplification conditions to produce a plurality of amplified target sequences. The methods further comprise detecting the presence of each of the plurality of target oncology sequences, wherein detection of one or more actionable oncology biomarkers as compared with a control sample determines a change in oncology activity in the sample indicative of a potential diagnosis, prognosis, candidate therapeutic regimen, and/or adverse event. The methods described herein utilize compositions of the invention provided herein. In some embodiments target genes are selected from the group consisting of DNA hotspot mutation genes, copy number variation (CNV) genes, inter-genetic fusion genes, and intra-genetic fusion genes. In certain embodiments target genes are selected from the genes of Table 1. In particular embodiments the target genes consist of the genes of Table 1.

[0008] Still further, uses of provided compositions and kits comprising provided compositions for analysis of sequences of the nucleic acid libraries are additional aspects of the invention. In some embodiments, analysis of the sequences of the resulting libraries enables detection of low frequency alleles, improved detection of gene fusions and novel fusions, and/or detection of genetic mutations in a sample of interest and/or multiple samples of interest is provided. In certain embodiments, manual, partially automated and fully automated implementations of uses of provided compositions and methods are contemplated. In a particular embodiment, use of provide compositions is implemented in a fully integrated library preparation, templating and sequencing system for genetic analysis of samples. In certain embodiments, uses of provided compositions and method of the invention provide benefit for research and clinical applications including first line testing of tissue and/or plasma specimens as well as ongoing monitoring of specimens for recurrence and/or resistance detection of biomarkers.

[0009] All publications, patents, and patent applications mentioned in this specification are herein incorporated by reference to the same extent as if each individual publication, patent, or patent application was specifically and individually indicated to be incorporated by reference.

[0010] Efficient methods for production of targeted libraries encompassing actionable oncology biomarkers from complex samples is desirable for a variety of nucleic acid analyses. The present invention provides, inter alia, methods of preparing libraries of target nucleic acid sequences, allowing for rapid production of highly multiplexed targeted libraries, including unique tag sequences; and resulting library compositions are useful for a variety of applications, including sequencing applications. Provided compositions are designed for the detection of mutations, copy number variations (CNVs), and gene fusions in tissue and plasma derived samples. Provided compositions comprise targeted primer panels and reagents for use in high throughput sample to results next generation workflows for genetic analysis. In particular embodiments, use is implemented on a completely integrated sample to analysis system. Novel features of the invention are set forth with particularity in the appended claims; and a complete understanding of the features and advantages of the present invention will be obtained by reference to the following detailed description that sets forth illustrative embodiments, in which the principles of the invention are utilized.

### DETAILED DESCRIPTION

[0011] Section headings used herein are for organizational purposes only and are not to be construed as limiting the described subject matter in any way. All literature and similar materials cited in this application, including but not limited to, patents, patent applications, articles, books, treatises, and internet web pages are expressly incorporated by reference in their entirety for any purpose. When definitions of terms in incorporated references appear to differ from the definitions provided in the present teachings, the definition provided in the present teachings shall control. It will be appreciated that there is an implied “about” prior to the temperatures, concentrations, times, etc., discussed in the present teachings, such that slight and insubstantial deviations are within the scope of the present teachings herein. In this application, the use of the singular includes the plural unless specifically stated otherwise. It is noted that, as used in this specification, singular forms “a,” “an,” and “the,” and any singular use of a word, include plural referents unless expressly and unequivocally limited to one referent. Also, the use of “comprise,” “comprises,” “comprising,” “contain,” “contains,” “containing,” “include,” “includes,” and “including” are not intended to be limiting. It is to be understood that both the general description is exemplary and explanatory only and not restrictive of the invention.

[0012] Unless otherwise defined, scientific and technical terms used in connection with the invention described herein shall have the meanings that are commonly understood by those of ordinary skill in the art. Further, unless otherwise required by context, singular terms shall include pluralities and plural terms shall include the singular. Generally, nomenclatures utilized in connection with, and techniques of, cell and tissue culture, molecular biology, and protein and oligo- or polynucleotide chemistry and hybridization used herein are those well-known and commonly used in the art. The practice of the present subject matter may employ, unless otherwise indicated, conventional techniques and descriptions of organic chemistry, molecular biology (including recombinant techniques), cell biology, and biochemistry, which are within the skill of the art. Such conventional techniques include, but are not limited to, preparation of synthetic polynucleotides, polymerization techniques, chemical and physical analysis of polymer particles, preparation of nucleic acid libraries, nucleic acid sequencing and analysis, and the like. Specific illustrations of suitable techniques can be used by reference to the examples provided herein. Other equivalent conventional procedures can also be used. Such conventional techniques and descriptions can be found in standard laboratory manuals such as Genome Analysis: A Laboratory Manual Series (Vols. I-IV), PCR Primer: A Laboratory Manual, and Molecular Cloning: A Laboratory Manual (all from Cold Spring Harbor Laboratory Press), Hermanson, Bioconjugate Techniques, Second Edition (Academic Press, 2008); Merkus, Particle Size Measurements (Springer, 2009); Rubinstein and Colby, Polymer Physics (Oxford University Press, 2003); and the like. As utilized in accordance with embodiments provided herein, the following terms, unless otherwise indicated, shall be understood to have the following meanings:

[0013] As used herein, “amplify,” “amplifying,” or “amplification reaction” and their derivatives, refer generally to an action or process whereby at least a portion of a nucleic acid molecule (referred to as a template nucleic acid molecule) is replicated or copied into at least one additional nucleic acid molecule. The additional nucleic acid molecule optionally includes sequence that is substantially identical or substantially complementary to at least some portion of the template nucleic acid molecule. A template target nucleic acid molecule may be single-stranded or double-stranded. The additional resulting replicated nucleic acid molecule may independently be single-stranded or double-stranded. In some embodiments, amplification includes a template-dependent in vitro enzyme-catalyzed reaction for the production of at least one copy of at least some portion of a target nucleic acid molecule or the production of at least one copy of a target nucleic acid sequence that is complementary to at least some portion of a target nucleic acid molecule. Amplification optionally includes linear or exponential replication of a nucleic acid molecule. In some embodiments, such amplification is performed using isothermal conditions; in other embodiments, such amplification can include thermocycling. In some embodiments, the amplification is a multiplex amplification that includes simultaneous amplification of a plurality of target sequences in a single amplification reaction. At least some target sequences can be situated on the same nucleic acid molecule or on different target nucleic acid molecules included in a single amplification reaction. In some embodiments, “amplification” includes amplification of at least some portion of DNA- and/or RNA-based nucleic acids, whether alone, or in combination. An amplification reaction can include single or double-stranded nucleic acid substrates and can further include any amplification processes known to one of ordinary skill in the art. In some embodiments, an amplification reaction includes polymerase chain reaction (PCR). In some embodiments, an amplification reaction includes isothermal amplification.

[0014] As used herein, “amplification conditions” and derivatives (e.g., conditions for amplification, etc.) generally refers to conditions suitable for amplifying one or more nucleic acid sequences. Amplification can be linear or exponential. In some embodiments, amplification conditions include isothermal conditions or alternatively include thermocycling conditions, or a combination of isothermal and thermocycling conditions. In some embodiments, conditions suitable for amplifying one or more target nucleic acid sequences includes polymerase chain reaction (PCR) conditions. Typically, amplification conditions refer to a reaction mixture that is sufficient to amplify nucleic acids such as one or more target sequences, or to amplify an amplified target sequence ligated to one or more adaptors, e.g., an adaptor-ligated amplified target sequence. Generally, amplification conditions include a catalyst for amplification or for nucleic acid synthesis, for example a polymerase; a primer that possesses some degree of complementarity to the nucleic acid to be amplified; and nucleotides, such as deoxyribonucleoside triphosphates (dNTPs) to promote extension of a primer once hybridized to a nucleic acid. Amplification conditions can require hybridization or annealing of a primer to a nucleic acid, extension of the primer and a denaturing step in which the extended primer is separated from the nucleic acid sequence undergoing amplification. Typically, though not necessarily, amplification conditions can include thermocycling. In some embodiments, amplification conditions include a plurality of cycles wherein steps of annealing, extending and separating are repeated. Typically, amplification conditions include cations such as Mg⁺⁺ or Mn⁺⁺ (e.g., MgCl₂, etc.) and can also optionally include various modifiers of ionic strength.

[0015] As used herein, “target sequence,” “target nucleic acid sequence,” or “target sequence of interest” and derivatives, refers generally to any single or double-stranded nucleic acid sequence that can be amplified or synthesized according to the disclosure, including any nucleic acid sequence suspected or expected to be present in a sample. In some embodiments, the target sequence is present in double-stranded form and includes at least a portion of the particular nucleotide sequence to be amplified or synthesized, or its complement, prior to the addition of target-specific primers or appended adaptors. Target sequences can include the nucleic acids to which primers useful in the amplification or synthesis reaction can hybridize prior to extension by a polymerase. In some embodiments, the term refers to a nucleic acid sequence whose sequence identity, ordering, or location of nucleotides is determined by one or more of the methods of the disclosure.

[0016] The term “portion” and its variants, as used herein, when used in reference to a given nucleic acid molecule, for example a primer or a template nucleic acid molecule, comprises any number of contiguous nucleotides within the length of the nucleic acid molecule, including the partial or entire length of the nucleic acid molecule.

[0017] As used herein, “contacting” and its derivatives, when used in reference to two or more components, refers generally to any process whereby the approach, proximity, mixture, or commingling of the referenced components is promoted or achieved without necessarily requiring physical contact of such components, and includes mixing of solutions containing any one or more of the referenced components with each other. The referenced components may be contacted in any particular order or combination and the particular order of recitation of components is not limiting. For example, “contacting A with B and C” encompasses embodiments where A is first contacted with B then C, as well as embodiments where C is contacted with A then B, as well as embodiments where a mixture of A and C is contacted with B, and the like. Furthermore, such contacting does not necessarily require that the end result of the contacting process be a mixture including all of the referenced components, as long as at some point during the contacting process all of the referenced components are simultaneously present or simultaneously included in the same mixture or solution. For example, “contacting A with B and C” can include embodiments wherein C is first contacted with A to form a first mixture, which first mixture is then contacted with B to form a second mixture, following which C is removed from the second mixture; optionally A can then also be removed, leaving only B. Where one or more of the referenced components to be contacted includes a plurality (e.g., “contacting a target sequence with a plurality of target-specific primers and a polymerase”), then each member of the plurality can be viewed as an individual component of the contacting process, such that the contacting can include contacting of any one or more members of the plurality with any other member of the plurality and/or with any other referenced component (e.g., some but not all of the plurality of target specific primers can be contacted with a target sequence, then a polymerase, and then with other members of the plurality of target-specific primers) in any order or combination.

[0018] As used herein, the term “primer” and its derivatives refer generally to any polynucleotide that can hybridize to a target sequence of interest. In some embodiments, the primer can also serve to prime nucleic acid synthesis. Typically, a primer functions as a substrate onto which nucleotides can be polymerized by a polymerase; in some embodiments, however, a primer can become incorporated into a synthesized nucleic acid strand and provide a site to which another primer can hybridize to prime synthesis of a new strand that is complementary to the synthesized nucleic acid molecule. A primer may be comprised of any combination of nucleotides or analogs thereof, which may be optionally linked to form a linear polymer of any suitable length. In some embodiments, a primer is a single-stranded oligonucleotide or polynucleotide. (For purposes of this disclosure, the terms “polynucleotide” and “oligonucleotide” are used interchangeably herein and do not necessarily indicate any difference in length between the two). In some embodiments, a primer is double-stranded. If double stranded, a primer is first treated to separate its strands before being used to prepare extension products. Preferably, the primer is an oligodeoxyribonucleotide. A primer must be sufficiently long to prime the synthesis of extension products. Lengths of the primers will depend on many factors, including temperature, source of primer, and the use of the method. In some embodiments, a primer acts as a point of initiation for amplification or synthesis when exposed to amplification or synthesis conditions; such amplification or synthesis can occur in a template-dependent fashion and optionally results in formation of a primer extension product that is complementary to at least a portion of the target sequence. Exemplary amplification or synthesis conditions can include contacting the primer with a polynucleotide template (e.g., a template including a target sequence), nucleotides, and an inducing agent such as a polymerase at a suitable temperature and pH to induce polymerization of nucleotides onto an end of the target-specific primer. If double-stranded, the primer can optionally be treated to separate its strands before being used to prepare primer extension products. In some embodiments, the primer is an oligodeoxyribonucleotide or an oligoribonucleotide. In some embodiments, the primer can include one or more nucleotide analogs. The exact length and/or composition, including sequence, of the target-specific primer can influence many properties, including melting temperature (Tm), GC content, formation of secondary structures, repeat nucleotide motifs, length of predicted primer extension products, extent of coverage across a nucleic acid molecule of interest, number of primers present in a single amplification or synthesis reaction, presence of nucleotide analogs or modified nucleotides within the primers, and the like. In some embodiments, a primer can be paired with a compatible primer within an amplification or synthesis reaction to form a primer pair consisting or a forward primer and a reverse primer. In some embodiments, the forward primer of the primer pair includes a sequence that is substantially complementary to at least a portion of a strand of a nucleic acid molecule, and the reverse primer of the primer of the primer pair includes a sequence that is substantially identical to at least of portion of the strand. In some embodiments, the forward primer and the reverse primer are capable of hybridizing to opposite strands of a nucleic acid duplex. Optionally, the forward primer primes synthesis of a first nucleic acid strand, and the reverse primer primes synthesis of a second nucleic acid strand, wherein the first and second strands are substantially complementary to each other, or can hybridize to form a double-stranded nucleic acid molecule. In some embodiments, one end of an amplification or synthesis product is defined by the forward primer and the other end of the amplification or synthesis product is defined by the reverse primer. In some embodiments, where the amplification or synthesis of lengthy primer extension products is required, such as amplifying an exon, coding region, or gene, several primer pairs can be created than span the desired length to enable sufficient amplification of the region. In some embodiments, a primer can include one or more cleavable groups. In some embodiments, primer lengths are in the range of about 10 to about 60 nucleotides, about 12 to about 50 nucleotides, and about 15 to about 40 nucleotides in length. Typically, a primer is capable of hybridizing to a corresponding target sequence and undergoing primer extension when exposed to amplification conditions in the presence of dNTPs and a polymerase. In some instances, the particular nucleotide sequence or a portion of the primer is known at the outset of the amplification reaction or can be determined by one or more of the methods disclosed herein. In some embodiments, the primer includes one or more cleavable groups at one or more locations within the primer.

[0019] As used herein, “target-specific primer” and its derivatives, refers generally to a single stranded or double-stranded polynucleotide, typically an oligonucleotide, that includes at least one sequence that is at least 50% complementary, typically at least 75% complementary or at least 85% complementary, more typically at least 90% complementary, more typically at least 95% complementary, more typically at least 98% or at least 99% complementary, or identical, to at least a portion of a nucleic acid molecule that includes a target sequence. In such instances, the target-specific primer and target sequence are described as “corresponding” to each other. In some embodiments, the target-specific primer is capable of hybridizing to at least a portion of its corresponding target sequence (or to a complement of the target sequence); such hybridization can optionally be performed under standard hybridization conditions or under stringent hybridization conditions. In some embodiments, the target-specific primer is not capable of hybridizing to the target sequence, or to its complement, but is capable of hybridizing to a portion of a nucleic acid strand including the target sequence, or to its complement. In some embodiments, the target-specific primer includes at least one sequence that is at least 75% complementary, typically at least 85% complementary, more typically at least 90% complementary, more typically at least 95% complementary, more typically at least 98% complementary, or more typically at least 99% complementary, to at least a portion of the target sequence itself; in other embodiments, the target-specific primer includes at least one sequence that is at least 75% complementary, typically at least 85% complementary, more typically at least 90% complementary, more typically at least 95% complementary, more typically at least 98% complementary, or more typically at least 99% complementary, to at least a portion of the nucleic acid molecule other than the target sequence. In some embodiments, the target-specific primer is substantially non-complementary to other target sequences present in the sample; optionally, the target-specific primer is substantially non-complementary to other nucleic acid molecules present in the sample. In some embodiments, nucleic acid molecules present in the sample that do not include or correspond to a target sequence (or to a complement of the target sequence) are referred to as “non-specific” sequences or “non-specific nucleic acids.” In some embodiments, the target-specific primer is designed to include a nucleotide sequence that is substantially complementary to at least a portion of its corresponding target sequence. In some embodiments, a target-specific primer is at least 95% complementary, or at least 99% complementary, or identical, across its entire length to at least a portion of a nucleic acid molecule that includes its corresponding target sequence. In some embodiments, a target-specific primer can be at least 90%, at least 95% complementary, at least 98% complementary or at least 99% complementary, or identical, across its entire length to at least a portion of its corresponding target sequence. In some embodiments, a forward target-specific primer and a reverse target-specific primer define a target-specific primer pair that can be used to amplify the target sequence via template-dependent primer extension. Typically, each primer of a target-specific primer pair includes at least one sequence that is substantially complementary to at least a portion of a nucleic acid molecule including a corresponding target sequence but that is less than 50% complementary to at least one other target sequence in the sample. In some embodiments, amplification can be performed using multiple target-specific primer pairs in a single amplification reaction, wherein each primer pair includes a forward target-specific primer and a reverse target-specific primer, each including at least one sequence that substantially complementary or substantially identical to a corresponding target sequence in the sample, and each primer pair having a different corresponding target sequence. In some embodiments, the target-specific primer can be substantially non-complementary at its 3′ end or its 5′ end to any other target-specific primer present in an amplification reaction. In some embodiments, the target-specific primer can include minimal cross hybridization to other target-specific primers in the amplification reaction. In some embodiments, target-specific primers include minimal cross-hybridization to non-specific sequences in the amplification reaction mixture. In some embodiments, the target-specific primers include minimal self-complementarity. In some embodiments, the target-specific primers can include one or more cleavable groups located at the 3′ end. In some embodiments, the target-specific primers can include one or more cleavable groups located near or about a central nucleotide of the target-specific primer. In some embodiments, one of more targets-specific primers includes only non-cleavable nucleotides at the 5′ end of the target-specific primer. In some embodiments, a target specific primer includes minimal nucleotide sequence overlap at the 3′end or the 5′ end of the primer as compared to one or more different target-specific primers, optionally in the same amplification reaction. In some embodiments 1, 2, 3, 4, 5, 6, 7, 8, 9, 10 or more, target-specific primers in a single reaction mixture include one or more of the above embodiments. In some embodiments, substantially all of the plurality of target-specific primers in a single reaction mixture includes one or more of the above embodiments.

[0020] As used herein, the term “adaptor” denotes a nucleic acid molecule that can be used for manipulation of a polynucleotide of interest. In some embodiments, adaptors are used for amplification of one or more target nucleic acids. In some embodiments, the adaptors are used in reactions for sequencing. In some embodiments, an adaptor has one or more ends that lack a 5′ phosphate residue. In some embodiments, an adaptor comprises, consists of, or consist essentially of at least one priming site. Such priming site containing adaptors can be referred to as “primer” adaptors. In some embodiments, the adaptor priming site can be useful in PCR processes. In some embodiments an adaptor includes a nucleic acid sequence that is substantially complementary to the 3′ end or the 5′ end of at least one target sequences within the sample, referred to herein as a gene specific target sequence, a target specific sequence, or target specific primer. In some embodiments, the adaptor includes nucleic acid sequence that is substantially non-complementary to the 3′ end or the 5′ end of any target sequence present in the sample. In some embodiments, the adaptor includes single stranded or double-stranded linear oligonucleotide that is not substantially complementary to an target nucleic acid sequence. In some embodiments, the adaptor includes nucleic acid sequence that is substantially non-complementary to at least one, and preferably some or all of the nucleic acid molecules of the sample. In some embodiments, suitable adaptor lengths are in the range of about 10-75 nucleotides, about 12-50 nucleotides, and about 15-40 nucleotides in length. Generally, an adaptor can include any combination of nucleotides and/or nucleic acids. In some aspects, adaptors include one or more cleavable groups at one or more locations. In some embodiments, the adaptor includes sequence that is substantially identical, or substantially complementary, to at least a portion of a primer, for example a universal primer. In some embodiments, adaptors include a tag sequence to assist with cataloguing, identification or sequencing. In some embodiments, an adaptor acts as a substrate for amplification of a target sequence, particularly in the presence of a polymerase and dNTPs under suitable temperature and pH.

[0021] As used herein, “polymerase” and its derivatives, generally refers to any enzyme that can catalyze the polymerization of nucleotides (including analogs thereof) into a nucleic acid strand. Typically, but not necessarily, such nucleotide polymerization can occur in a template-dependent fashion. Such polymerases can include without limitation naturally occurring polymerases and any subunits and truncations thereof, mutant polymerases, variant polymerases, recombinant, fusion or otherwise engineered polymerases, chemically modified polymerases, synthetic molecules or assemblies, and any analogs, derivatives or fragments thereof that retain the ability to catalyze such polymerization. Optionally, the polymerase can be a mutant polymerase comprising one or more mutations involving the replacement of one or more amino acids with other amino acids, the insertion or deletion of one or more amino acids from the polymerase, or the linkage of parts of two or more polymerases. Typically, the polymerase comprises one or more active sites at which nucleotide binding and/or catalysis of nucleotide polymerization can occur. Some exemplary polymerases include without limitation DNA polymerases and RNA polymerases. The term “polymerase” and its variants, as used herein, also refers to fusion proteins comprising at least two portions linked to each other, where the first portion comprises a peptide that can catalyze the polymerization of nucleotides into a nucleic acid strand and is linked to a second portion that comprises a second polypeptide. In some embodiments, the second polypeptide can include a reporter enzyme or a processivity-enhancing domain. Optionally, the polymerase can possess 5′ exonuclease activity or terminal transferase activity. In some embodiments, the polymerase can be optionally reactivated, for example through the use of heat, chemicals or re-addition of new amounts of polymerase into a reaction mixture. In some embodiments, the polymerase can include a hot-start polymerase and/or an aptamer based polymerase that optionally can be reactivated.

[0022] The terms “identity” and “identical” and their variants, as used herein, when used in reference to two or more nucleic acid or polypeptide sequences, refer to similarity in sequence of the two or more sequences (e.g., nucleotide or polypeptide sequences). In the context of two or more homologous sequences, the percent identity or homology of the sequences or subsequences thereof indicates the percentage of all monomeric units (e.g., nucleotides or amino acids) that are the same (i.e., about 70% identity, preferably 75%, 80%, 85%, 90%, 95%, 98% or 99% identity). The percent identity can be over a specified region, when compared and aligned for maximum correspondence over a comparison window, or designated region as measured using a BLAST or BLAST 2.0 sequence comparison algorithms with default parameters described below, or by manual alignment and visual inspection. Sequences are said to be “substantially identical” when there is at least 85% identity at the amino acid level or at the nucleotide level. Preferably, the identity exists over a region that is at least about 25, 50, or 100 residues in length, or across the entire length of at least one compared sequence. A typical algorithm for determining percent sequence identity and sequence similarity are the BLAST and BLAST 2.0 algorithms, which are described in Altschul et al, Nuc. Acids Res. 25:3389-3402 (1977). Other methods include the algorithms of Smith & Waterman, Adv. Appl. Math. 2:482 (1981), and Needleman & Wunsch, J. Mol. Biol. 48:443 (1970), etc. Another indication that two nucleic acid sequences are substantially identical is that the two molecules or their complements hybridize to each other under stringent hybridization conditions.

[0023] The terms “complementary” and “complement” and their variants, as used herein, refer to any two or more nucleic acid sequences (e.g., portions or entireties of template nucleic acid molecules, target sequences and/or primers) that can undergo cumulative base pairing at two or more individual corresponding positions in antiparallel orientation, as in a hybridized duplex. Such base pairing can proceed according to any set of established rules, for example according to Watson-Crick base pairing rules or according to some other base pairing paradigm. Optionally there can be “complete” or “total” complementarity between a first and second nucleic acid sequence where each nucleotide in the first nucleic acid sequence can undergo a stabilizing base pairing interaction with a nucleotide in the corresponding antiparallel position on the second nucleic acid sequence. “Partial” complementarity describes nucleic acid sequences in which at least 20%, but less than 100%, of the residues of one nucleic acid sequence are complementary to residues in the other nucleic acid sequence. In some embodiments, at least 50%, but less than 100%, of the residues of one nucleic acid sequence are complementary to residues in the other nucleic acid sequence. In some embodiments, at least 70%, 80%, 90%, 95%, or 98%, but less than 100%, of the residues of one nucleic acid sequence are complementary to residues in the other nucleic acid sequence. Sequences are said to be “substantially complementary” when at least 85% of the residues of one nucleic acid sequence are complementary to residues in the other nucleic acid sequence. In some embodiments, two complementary or substantially complementary sequences are capable of hybridizing to each other under standard or stringent hybridization conditions. “Non-complementary” describes nucleic acid sequences in which less than 20% of the residues of one nucleic acid sequence are complementary to residues in the other nucleic acid sequence. Sequences are said to be “substantially non-complementary” when less than 15% of the residues of one nucleic acid sequence are complementary to residues in the other nucleic acid sequence. In some embodiments, two non-complementary or substantially non-complementary sequences cannot hybridize to each other under standard or stringent hybridization conditions. A “mismatch” is present at any position in the two opposed nucleotides are not complementary. Complementary nucleotides include nucleotides that are efficiently incorporated by DNA polymerases opposite each other during DNA replication under physiological conditions. In a typical embodiment, complementary nucleotides can form base pairs with each other, such as the A-T/U and G-C base pairs formed through specific Watson-Crick type hydrogen bonding, or base pairs formed through some other type of base pairing paradigm, between the nucleobases of nucleotides and/or polynucleotides in positions antiparallel to each other. The complementarity of other artificial base pairs can be based on other types of hydrogen bonding and/or hydrophobicity of bases and/or shape complementarity between bases.

[0024] As used herein, “amplified target sequences” and its derivatives, refers generally to a nucleic acid sequence produced by the amplification of/amplifying the target sequences using target-specific primers and the methods provided herein. The amplified target sequences may be either of the same sense (the positive strand produced in the second round and subsequent even-numbered rounds of amplification) or antisense (i.e., the negative strand produced during the first and subsequent odd-numbered rounds of amplification) with respect to the target sequences. For the purposes of this disclosure, amplified target sequences are typically less than 50% complementary to any portion of another amplified target sequence in the reaction.

[0025] As used herein, terms “ligating,” “ligation,” and derivatives refer generally to the act or process for covalently linking two or more molecules together, for example, covalently linking two or more nucleic acid molecules to each other. In some embodiments, ligation includes joining nicks between adjacent nucleotides of nucleic acids. In some embodiments, ligation includes forming a covalent bond between an end of a first and an end of a second nucleic acid molecule. In some embodiments, for example embodiments wherein the nucleic acid molecules to be ligated include conventional nucleotide residues, the ligation can include forming a covalent bond between a 5′ phosphate group of one nucleic acid and a 3′ hydroxyl group of a second nucleic acid thereby forming a ligated nucleic acid molecule. In some embodiments, any means for joining nicks or bonding a 5′phosphate to a 3′ hydroxyl between adjacent nucleotides can be employed. In an exemplary embodiment, an enzyme such as a ligase can be used.

[0026] As used herein, “ligase” and its derivatives, refers generally to any agent capable of catalyzing the ligation of two substrate molecules. In some embodiments, the ligase includes an enzyme capable of catalyzing the joining of nicks between adjacent nucleotides of a nucleic acid. In some embodiments, a ligase includes an enzyme capable of catalyzing the formation of a covalent bond between a 5′ phosphate of one nucleic acid molecule to a 3′ hydroxyl of another nucleic acid molecule thereby forming a ligated nucleic acid molecule. Suitable ligases may include, but not limited to, T4 DNA ligase; T7 DNA ligase; Taq DNA ligase, and E. coli DNA ligase.

[0027] As defined herein, a “cleavable group” generally refers to any moiety that once incorporated into a nucleic acid can be cleaved under appropriate conditions. For example, a cleavable group can be incorporated into a target-specific primer, an amplified sequence, an adaptor, or a nucleic acid molecule of the sample. In an exemplary embodiment, a target-specific primer can include a cleavable group that becomes incorporated into the amplified product and is subsequently cleaved after amplification, thereby removing a portion, or all, of the target-specific primer from the amplified product. The cleavable group can be cleaved or otherwise removed from a target-specific primer, an amplified sequence, an adaptor or a nucleic acid molecule of the sample by any acceptable means. For example, a cleavable group can be removed from a target-specific primer, an amplified sequence, an adaptor, or a nucleic acid molecule of the sample by enzymatic, thermal, photo-oxidative or chemical treatment. In one aspect, a cleavable group can include a nucleobase that is not naturally occurring. For example, an oligodeoxyribonucleotide can include one or more RNA nucleobases, such as uracil that can be removed by a uracil glycosylase. In some embodiments, a cleavable group can include one or more modified nucleobases (such as 7-methylguanine, 8-oxo-guanine, xanthine, hypoxanthine, 5,6-dihydrouracil, or 5-methylcytosine) or one or more modified nucleosides (i.e., 7-methylguanosine, 8-oxo-deoxyguanosine, xanthosine, inosine, dihydrouridine, or 5-methylcytidine). The modified nucleobases or nucleotides can be removed from the nucleic acid by enzymatic, chemical or thermal means. In one embodiment, a cleavable group can include a moiety that can be removed from a primer after amplification (or synthesis) upon exposure to ultraviolet light (i.e., bromodeoxyuridine). In another embodiment, a cleavable group can include methylated cytosine. Typically, methylated cytosine can be cleaved from a primer for example, after induction of amplification (or synthesis), upon sodium bisulfite treatment. In some embodiments, a cleavable moiety can include a restriction site. For example, a primer or target sequence can include a nucleic acid sequence that is specific to one or more restriction enzymes, and following amplification (or synthesis), the primer or target sequence can be treated with the one or more restriction enzymes such that the cleavable group is removed. Typically, one or more cleavable groups can be included at one or more locations with a target-specific primer, an amplified sequence, an adaptor or a nucleic acid molecule of the sample.

[0028] As used herein, “digestion,” “digestion step,” and its derivatives, generally refers to any process by which a cleavable group is cleaved or otherwise removed from a target-specific primer, an amplified sequence, an adaptor or a nucleic acid molecule of the sample. In some embodiments, the digestion step involves a chemical, thermal, photo-oxidative or digestive process.

[0029] As used herein, the term “hybridization” is consistent with its use in the art, and generally refers to the process whereby two nucleic acid molecules undergo base pairing interactions. Two nucleic acid molecule molecules are said to be hybridized when any portion of one nucleic acid molecule is base paired with any portion of the other nucleic acid molecule; it is not necessarily required that the two nucleic acid molecules be hybridized across their entire respective lengths and in some embodiments, at least one of the nucleic acid molecules can include portions that are not hybridized to the other nucleic acid molecule. The phrase “hybridizing under stringent conditions” and its variants refers generally to conditions under which hybridization of a target-specific primer to a target sequence occurs in the presence of high hybridization temperature and low ionic strength. As used herein, the phrase “standard hybridization conditions” and its variants refers generally to conditions under which hybridization of a primer to an oligonucleotide (i.e., a target sequence), occurs in the presence of low hybridization temperature and high ionic strength. In one exemplary embodiment, standard hybridization conditions include an aqueous environment containing about 100 mM magnesium sulfate, about 500 mM Tris-sulfate at pH 8.9, and about 200 mM ammonium sulfate at about 50-55° C., or equivalents thereof.

[0030] As used herein, the term “end” and its variants, when used in reference to a nucleic acid molecule, for example a target sequence or amplified target sequence, can include the terminal 30 nucleotides, the terminal 20 and even more typically the terminal 15 nucleotides of the nucleic acid molecule. A linear nucleic acid molecule comprised of linked series of contiguous nucleotides typically includes at least two ends. In some embodiments, one end of the nucleic acid molecule can include a 3′ hydroxyl group or its equivalent, and can be referred to as the “3′ end” and its derivatives. Optionally, the 3′ end includes a 3′ hydroxyl group that is not linked to a 5′ phosphate group of a mononucleotide pentose ring. Typically, the 3′ end includes one or more 5′ linked nucleotides located adjacent to the nucleotide including the unlinked 3′ hydroxyl group, typically the 30 nucleotides located adjacent to the 3′ hydroxyl, typically the terminal 20 and even more typically the terminal 15 nucleotides. Generally, the one or more linked nucleotides can be represented as a percentage of the nucleotides present in the oligonucleotide or can be provided as a number of linked nucleotides adjacent to the unlinked 3′ hydroxyl. For example, the 3′ end can include less than 50% of the nucleotide length of the oligonucleotide. In some embodiments, the 3′ end does not include any unlinked 3′ hydroxyl group but can include any moiety capable of serving as a site for attachment of nucleotides via primer extension and/or nucleotide polymerization. In some embodiments, the term “3′ end” for example when referring to a target-specific primer, can include the terminal 10 nucleotides, the terminal 5 nucleotides, the terminal 4, 3, 2 or fewer nucleotides at the 3′end. In some embodiments, the term “3′ end” when referring to a target-specific primer can include nucleotides located at nucleotide positions 10 or fewer from the 3′ terminus. As used herein, “5′ end,” and its derivatives, generally refers to an end of a nucleic acid molecule, for example a target sequence or amplified target sequence, which includes a free 5′ phosphate group or its equivalent. In some embodiments, the 5′ end includes a 5′ phosphate group that is not linked to a 3′ hydroxyl of a neighboring mononucleotide pentose ring. Typically, the 5′ end includes one or more linked nucleotides located adjacent to the 5′ phosphate, typically the 30 nucleotides located adjacent to the nucleotide including the 5′ phosphate group, typically the terminal 20 and even more typically the terminal 15 nucleotides. Generally, the one or more linked nucleotides can be represented as a percentage of the nucleotides present in the oligonucleotide or can be provided as a number of linked nucleotides adjacent to the 5′ phosphate. For example, the 5′ end can be less than 50% of the nucleotide length of an oligonucleotide. In another exemplary embodiment, the 5′ end can include about 15 nucleotides adjacent to the nucleotide including the terminal 5′ phosphate. In some embodiments, the 5′ end does not include any unlinked 5′ phosphate group but can include any moiety capable of serving as a site of attachment to a 3′ hydroxyl group, or to the 3′end of another nucleic acid molecule. In some embodiments, the term “5′ end” for example when referring to a target-specific primer, can include the terminal 10 nucleotides, the terminal 5 nucleotides, the terminal 4, 3, 2 or fewer nucleotides at the 5′end. In some embodiments, the term “5′ end” when referring to a target-specific primer can include nucleotides located at positions 10 or fewer from the 5′ terminus. In some embodiments, the 5′ end of a target-specific primer can include only non-cleavable nucleotides, for example nucleotides that do not contain one or more cleavable groups as disclosed herein, or a cleavable nucleotide as would be readily determined by one of ordinary skill in the art. A “first end” and a “second end” of a polynucleotide refer to the 5′ end or the 3′end of the polynucleotide. Either the first end or second end of a polynucleotide can be the 5′ end or the 3′ end of the polynucleotide; the terms “first” and “second” are not meant to denote that the end is specifically the 5′ end or the 3′ end.

[0031] As used herein “tag,” “barcode,” “unique tag,” or “tag sequence” and its derivatives, refers generally to a unique short (6-14 nucleotide) nucleic acid sequence within an adaptor or primer that can act as a ‘key’ to distinguish or separate a plurality of amplified target sequences in a sample. For the purposes of this disclosure, a barcode or unique tag sequence is incorporated into the nucleotide sequence of an adaptor or primer. As used herein, “barcode sequence” denotes a nucleic acid fixed sequence that is sufficient to allow for the identification of a sample or source of nucleic acid sequences of interest. A barcode sequence can be, but need not be, a small section of the original nucleic acid sequence on which the identification is to be based. In some embodiments a barcode is 5-20 nucleic acids long. In some embodiments, the barcode is comprised of analog nucleotides, such as L-DNA, LNA, PNA, etc. As used herein, “unique tag sequence” denotes a nucleic acid sequence having at least one random sequence and at least one fixed sequence. A unique tag sequence, alone or in conjunction with a second unique tag sequence, is sufficient to allow for the identification of a single target nucleic acid molecule in a sample. A unique tag sequence can, but need not, comprise a small section of the original target nucleic acid sequence. In some embodiments a unique tag sequence is 2-50 nucleotides or base-pairs, or 2-25 nucleotides or base-pairs, or 2-10 nucleotides or base-pairs in length. A unique tag sequence can comprise at least one random sequence interspersed with a fixed sequence.

[0032] As used herein, “comparable maximal minimum melting temperatures” and its derivatives, refers generally to the melting temperature (Tm) of each nucleic acid fragment for a single adaptor or target-specific primer after digestion of a cleavable groups. The hybridization temperature of each nucleic acid fragment generated by an adaptor or target-specific primer is compared to determine the maximal minimum temperature required preventing hybridization of a nucleic acid sequence from the target-specific primer or adaptor or fragment or portion thereof to a respective target sequence. Once the maximal hybridization temperature is known, it is possible to manipulate the adaptor or target-specific primer, for example by moving the location of one or more cleavable group(s) along the length of the primer, to achieve a comparable maximal minimum melting temperature with respect to each nucleic acid fragment to thereby optimize digestion and repair steps of library preparation.

[0033] As used herein, “addition only” and its derivatives, refers generally to a series of steps in which reagents and components are added to a first or single reaction mixture. Typically, the series of steps excludes the removal of the reaction mixture from a first vessel to a second vessel in order to complete the series of steps. Generally, an addition only process excludes the manipulation of the reaction mixture outside the vessel containing the reaction mixture. Typically, an addition-only process is amenable to automation and high-throughput.

[0034] As used herein, “polymerizing conditions” and its derivatives, refers generally to conditions suitable for nucleotide polymerization. In typical embodiments, such nucleotide polymerization is catalyzed by a polymerase. In some embodiments, polymerizing conditions include conditions for primer extension, optionally in a template-dependent manner, resulting in the generation of a synthesized nucleic acid sequence. In some embodiments, the polymerizing conditions include polymerase chain reaction (PCR). Typically, the polymerizing conditions include use of a reaction mixture that is sufficient to synthesize nucleic acids and includes a polymerase and nucleotides. The polymerizing conditions can include conditions for annealing of a target-specific primer to a target sequence and extension of the primer in a template dependent manner in the presence of a polymerase. In some embodiments, polymerizing conditions can be practiced using thermocycling. Additionally, polymerizing conditions can include a plurality of cycles where the steps of annealing, extending, and separating the two nucleic strands are repeated. Typically, the polymerizing conditions include a cation such as MgCl₂. Generally, polymerization of one or more nucleotides to form a nucleic acid strand includes that the nucleotides be linked to each other via phosphodiester bonds, however, alternative linkages may be possible in the context of particular nucleotide analogs.

[0035] As used herein, the term “nucleic acid” refers to natural nucleic acids, artificial nucleic acids, analogs thereof, or combinations thereof, including polynucleotides and oligonucleotides. As used herein, the terms “polynucleotide” and “oligonucleotide” are used interchangeably and mean single-stranded and double-stranded polymers of nucleotides including, but not limited to, 2′-deoxyribonucleotides (nucleic acid) and ribonucleotides (RNA) linked by internucleotide phosphodiester bond linkages, e.g. 3′-5′ and 2′-5′, inverted linkages, e.g. 3′-3′ and 5′-5′, branched structures, or analog nucleic acids. Polynucleotides have associated counter ions, such as H⁺, NH₄⁺, trialkylammonium, Mg²⁺, Na⁺, and the like. An oligonucleotide can be composed entirely of deoxyribonucleotides, entirely of ribonucleotides, or chimeric mixtures thereof. Oligonucleotides can be comprised of nucleobase and sugar analogs. Polynucleotides typically range in size from a few monomeric units, e.g. 5-40, when they are more commonly frequently referred to in the art as oligonucleotides, to several thousands of monomeric nucleotide units, when they are more commonly referred to in the art as polynucleotides; for purposes of this disclosure, however, both oligonucleotides and polynucleotides may be of any suitable length. Unless denoted otherwise, whenever a oligonucleotide sequence is represented, it will be understood that the nucleotides are in 5′ to 3′ order from left to right and that “A” denotes deoxyadenosine, “C” denotes deoxycytidine, “G” denotes deoxyguanosine, “T” denotes thymidine, and “U’ denotes deoxyuridine. As discussed herein and known in the art, oligonucleotides and polynucleotides are said to have “5′ ends” and “3′ ends” because mononucleotides are typically reacted to form oligonucleotides via attachment of the 5′ phosphate or equivalent group of one nucleotide to the 3′ hydroxyl or equivalent group of its neighboring nucleotide, optionally via a phosphodiester or other suitable linkage.

[0036] As used herein, the term “polymerase chain reaction” (“PCR”) refers to the method of K. B. Mullis U.S. Pat. Nos. 4,683,195 and 4,683,202, hereby incorporated by reference, which describe a method for increasing the concentration of a segment of a polynucleotide of interest in a mixture of genomic DNA without cloning or purification. This process for amplifying the polynucleotide of interest consists of introducing a large excess of two oligonucleotide primers to the DNA mixture containing the desired polynucleotide of interest, followed by a precise sequence of thermal cycling in the presence of a DNA polymerase. The two primers are complementary to their respective strands of the double stranded polynucleotide of interest. To effect amplification, the mixture is denatured and the primers then annealed to their complementary sequences within the polynucleotide of interest molecule. Following annealing, the primers are extended with a polymerase to form a new pair of complementary strands. The steps of denaturation, primer annealing, and polymerase extension can be repeated many times (i.e., denaturation, annealing and extension constitute one “cycle”; there can be numerous “cycles”) to obtain a high concentration of an amplified segment of the desired polynucleotide of interest. The length of the amplified segment of the desired polynucleotide of interest (amplicon) is determined by the relative positions of the primers with respect to each other, and therefore, this length is a controllable parameter. By virtue of repeating the process, the method is referred to as the “polymerase chain reaction” (hereinafter “PCR”). Because the desired amplified segments of the polynucleotide of interest become the predominant nucleic acid sequences (in terms of concentration) in the mixture, they are said to be “PCR amplified.” As defined herein, target nucleic acid molecules within a sample including a plurality of target nucleic acid molecules are amplified via PCR. In a modification to the method discussed above, the target nucleic acid molecules can be PCR amplified using a plurality of different primer pairs, in some cases, one or more primer pairs per target nucleic acid molecule of interest, thereby forming a multiplex PCR reaction. Using multiplex PCR, it is possible to simultaneously amplify multiple nucleic acid molecules of interest from a sample to form amplified target sequences. It is also possible to detect the amplified target sequences by several different methodologies (e.g., quantitation with a bioanalyzer or qPCR, hybridization with a labeled probe; incorporation of biotinylated primers followed by avidin-enzyme conjugate detection; incorporation of ³²P-labeled deoxynucleotide triphosphates, such as dCTP or dATP, into the amplified target sequence). Any oligonucleotide sequence can be amplified with the appropriate set of primers, thereby allowing for the amplification of target nucleic acid molecules from genomic DNA, cDNA, formalin-fixed paraffin-embedded DNA, fine-needle biopsies and various other sources. In particular, the amplified target sequences created by the multiplex PCR process as disclosed herein, are themselves efficient substrates for subsequent PCR amplification or various downstream assays or manipulations.

[0037] As defined herein “multiplex amplification” refers to selective and non-random amplification of two or more target sequences within a sample using at least one target-specific primer. In some embodiments, multiplex amplification is performed such that some or all of the target sequences are amplified within a single reaction vessel. The “plexy” or “plex” of a given multiplex amplification refers generally to the number of different target-specific sequences that are amplified during that single multiplex amplification. In some embodiments, the plexy can be about 12-plex, 24-plex, 48-plex, 96-plex, 192-plex, 384-plex, 768-plex, 1536-plex, 3072-plex, 6144-plex or higher.

### Compositions

[0038] We have developed a single stream multiplex next generation sequencing workflow for determination of actionable oncology tumor biomarkers in a sample, in order to determine oncology status in a sample. The oncology precision assay compositions and methods of the invention offer a specific and robust solution for biomarker screening for understanding mechanisms involved with tumor immune response. Thus, provided are compositions for multiplex library preparation and use in conjunction with next generation sequencing technologies and workflow solutions (e.g., Ion Torrent™ NGS workflow), manual or automated, to evaluate low level biomarker targets in a variety of sample types to assess oncology status.

[0039] Thus, provided are compositions for a single stream multiplex determination of actionable oncology biomarkers in a sample. In some embodiments, the composition consists of a plurality of sets of primer pair reagents directed to a plurality of target sequences to detect low level targets in the sample, wherein the target genes are selected from oncology response genes consisting of the following function: DNA hotspot mutation genes, copy number variation (CNV) genes, inter-genetic fusion genes, and intra-genetic fusion genes. In some embodiments, the target genes are selected from oncology genes consisting of one or more function of Table 1. In some embodiments, the target genes are selected from one or more actionable target genes in a sample that determines a change in oncology activity in the sample indicative of a potential diagnosis, prognosis, candidate therapeutic regimen, and/or adverse event likelihood. In total, the various functions of genes comprising the provided multiplex panel of the invention provide a comprehensive picture recommending actionable approaches to cancer therapy.

[0040] In certain embodiments, target oncology sequences are directed to sequences having mutations associated with cancer. In some embodiments, the target sequences or amplified target sequences are directed to sequences having mutations associated with one or more solid tumor cancers selected from the group consisting of head and neck cancers (e.g., HNSCC, nasopharyngeal, salivary gland), brain cancer (e.g., glioblastoma, glioma, gliosarcoma, glioblastoma multiforme, neuroblastoma), breast cancer (e.g., TNBC, trastuzumab resistant HER2+ breast cancer, ER+/HER− breast cancer), gynecological (e.g., uterine, ovarian cancer, cervical cancer, endometrial cancer, fallopian cancer), colorectal cancer, gallbladder cancer, esophageal cancer, gastrointestinal cancer, gastric cancer, bladder cancer, prostate cancer, testicular cancer, urothelial cancer, liver cancer (e.g., hepatocellular, HCC), lung cancer (e.g., non-small cell lung, small cell lung), kidney (renal cell) cancer, pancreatic cancer (e.g., adenocarcinoma, ductal), thyroid cancer, bile duct cancer, pituitary tumor, Wilms tumor, Kaposi sarcoma, hairy cell carcinoma, osteosarcoma, thymus cancer, skin cancer, melanoma, heart cancer, oral and larynx cancer, neuroblastoma, mesothelioma, and other solid tumors (thymic, bone, soft tissue, oral SCC, myelofibrosis, synovial sarcoma). In one embodiment, the mutations can include substitutions, insertions, inversions, point mutations, deletions, mismatches and translocations. In some embodiments, the target sequences or amplified target sequences are directed to sequences having mutations associated with one or more blood/hematologic cancers selected from the group consisting of multiple myeloma, diffuse large B cell lymphoma (DLBCL), lymphoma, Hodgkins lymphoma, non-Hodgkins lymphoma, follicular lymphoma, leukemia, acute myeloid leukemia (AML), chronic lymphocytic leukemia (CLL), myelodysplastic syndrome. In one embodiment, the mutant biomarker associated with cancer is located in at least one of the genes provided in Table 1.

[0041] In some embodiments, one or more mutant oncology sequences are located in at least one of the genes selected from, Table 1. In some embodiments the one or more mutant sequences indicate cancer activity.

[0042] In some embodiments the one or more mutant sequences indicate a patient's likelihood to respond to a therapeutic agent. In some embodiments, the one or more mutant oncology biomarker sequences indication a patient's likelihood to not be responsive to a therapeutic agent. In certain embodiments, relevant therapeutic agents can be oncology therapies including but not limited to kinase inhibitors, cell signaling inhibitors, checkpoint blockades, T cell therapies, and therapeutic vaccines.

[0043] In some embodiments, target sequences or mutant target sequences are directed to mutations associated with cancer. In some embodiments, the target sequences or mutant target sequences are directed to mutations associated with one or more solid tumor cancers selected from the group consisting of head and neck cancers (e.g., HNSCC, nasopharyngeal, salivary gland), brain cancer (e.g., glioblastoma, glioma, gliosarcoma, glioblastoma multiforme, neuroblastoma), breast cancer (e.g., TNBC, trastuzumab resistant HER2+ breast cancer, ER+/HER− breast cancer), gynecological (e.g., uterine, ovarian cancer, cervical cancer, endometrial cancer, fallopian cancer), colorectal cancer, gallbladder cancer, esophageal cancer, gastrointestinal cancer, gastric cancer, bladder cancer, prostate cancer, testicular cancer, urothelial cancer, liver cancer (e.g., hepatocellular, HCC), lung cancer (e.g., non-small cell lung, small cell lung), kidney (renal cell) cancer, pancreatic cancer (e.g., adenocarcinoma, ductal), thyroid cancer, bile duct cancer, pituitary tumor, Wilms tumor, Kaposi sarcoma, hairy cell carcinoma, osteosarcoma, thymus cancer, skin cancer, melanoma, heart cancer, oral and larynx cancer, neuroblastoma, mesothelioma, and other solid tumors (thymic, bone, soft tissue, oral SCC, myelofibrosis, synovial sarcoma). In one embodiment, the mutations can include substitutions, insertions, inversions, point mutations, deletions, mismatches and translocations. In one embodiment, the mutations can include variation in copy number. In one embodiment, the mutations can include germline or somatic mutations. In some embodiments, the target sequences or amplified target sequences are directed to sequences having mutations associated with one or more blood/hematologic cancers selected from the group consisting of multiple myeloma, diffuse large B cell lymphoma (DLBCL), lymphoma, Hodgkins lymphoma, non-Hodgkins lymphoma, follicular lymphoma, leukemia, acute myeloid leukemia (AML), chronic lymphocytic leukemia (CLL), myelodysplastic syndrome.

[0044] In one embodiment, the mutations associated with cancer are located in at least one of the genes provided in Table 1. In some embodiments, mutant target sequences are directed to any one of more of the genes provided in Table 1. In some embodiments, mutant target sequences comprise any one or more amplicon sequences of the genes provided in Table 1. In some embodiments, mutant target sequences consist of any one or more amplicon sequences of the genes provided in Table 1. In some embodiments, mutant target sequences include amplicon sequences of each of the genes provided in Table 1.

[0045] In some embodiments, compositions comprise any one or more of oncology target-specific primer pairs provided in Table A. In some embodiments, compositions comprise all of the oncology target-specific primer pairs provided in Table A. In some embodiments, any one or more of the oncology target-specific primer pairs provided in Table A can be used to amplify a target sequence present in a sample as disclosed by the methods described herein.

[0046] In some embodiments, the oncology target-specific primers from Table A include 2, 3, 4, 5, 6, 7, 8, 9, 10, 20, 40, 60, 80, 100, 150, 200, 250, 300, 350, 400, 450, 500, 550, 600 or more, target-specific primer pairs. In some embodiments, the amplified target sequences can include any one or more of the amplified target sequences produced using target-specific primers provided in Table A. In some embodiments, at least one of the target-specific primers associated with cancer is at least 90% identical to at least one nucleic acid sequence produced using target specific primers selected from SEQ ID NOs: 1-1559. In some embodiments, at least one of the target-specific primers associated with oncology is complementary across its entire length to at least one target sequence in a sample. In some embodiments, at least one of the target-specific primers includes a non-cleavable nucleotide at the 3′ end. In some embodiments, the non-cleavable nucleotide at the 3′ end includes the terminal 3′ nucleotide. In one embodiment, the amplified target sequences are directed to one or more individual exons having mutations associated with cancer. In one embodiment, the amplified target sequences are directed to individual exons having a mutation associated with cancer.

### Methods

[0047] Provided methods of the invention comprise efficient procedures which enable rapid preparation of highly multiplexed libraries suitable for downstream analysis. The methods optionally allow for incorporation of one or more unique tag sequences. Certain methods comprise streamlined, addition-only procedures conveying highly rapid library generation.

[0048] Provided herein are methods for determining oncology activity in a sample. In some embodiments, the method comprises multiplex amplification of a plurality of oncology sequences from a biological sample, wherein amplifying comprises contacting at least a portion of the sample with a plurality of sets of primer pair reagents directed to the plurality of target sequences, and a polymerase under amplification conditions, to thereby produce amplified target expression sequences. The method further comprises detecting the presence of a mutation of the one or more target sequences in the sample, wherein a mutation of one or more oncology markers as compared with a control determines a change in oncology activity in the sample. In some embodiments the oncology sequences of the methods are selected from oncology response genes consisting of the following function: DNA hotspot mutation genes, copy number variation (CNV) genes, inter-genetic fusion genes, and intra-genetic fusion genes. In some embodiments, the target genes are selected from oncology genes consisting of one or more function of Table 1. In some embodiments, the target genes are selected from one or more actionable target genes in a sample that determines a change in oncology activity in the sample indicative of a potential diagnosis, prognosis, candidate therapeutic regimen, and/or adverse event likelihood. In total, the various functions of genes comprising the provided multiplex panel of the invention provide a comprehensive picture recommending actionable approaches to cancer therapy.

[0049] In certain embodiments, target oncology sequences of the methods are directed to sequences having mutations associated with cancer. In some embodiments, the target sequences or amplified target sequences are directed to sequences having mutations associated with one or more solid tumor cancers selected from the group consisting of head and neck cancers (e.g., HNSCC, nasopharyngeal, salivary gland), brain cancer (e.g., glioblastoma, glioma, gliosarcoma, glioblastoma multiforme, neuroblastoma), breast cancer (e.g., TNBC, trastuzumab resistant HER2+ breast cancer, ER+/HER− breast cancer), gynecological (e.g., uterine, ovarian cancer, cervical cancer, endometrial cancer, fallopian cancer), colorectal cancer, gallbladder cancer, esophageal cancer, gastrointestinal cancer, gastric cancer, bladder cancer, prostate cancer, testicular cancer, urothelial cancer, liver cancer (e.g., hepatocellular, HCC), lung cancer (e.g., non-small cell lung, small cell lung), kidney (renal cell) cancer, pancreatic cancer (e.g., adenocarcinoma, ductal), thyroid cancer, bile duct cancer, pituitary tumor, Wilms tumor, Kaposi sarcoma, hairy cell carcinoma, osteosarcoma, thymus cancer, skin cancer, melanoma, heart cancer, oral and larynx cancer, neuroblastoma, mesothelioma, and other solid tumors (thymic, bone, soft tissue, oral SCC, myelofibrosis, synovial sarcoma). In one embodiment, the mutations can include substitutions, insertions, inversions, point mutations, deletions, mismatches and translocations. In some embodiments, the target sequences or amplified target sequences are directed to sequences having mutations associated with one or more blood/hematologic cancers selected from the group consisting of multiple myeloma, diffuse large B cell lymphoma (DLBCL), lymphoma, Hodgkins lymphoma, non-Hodgkins lymphoma, follicular lymphoma, leukemia, acute myeloid leukemia (AML), chronic lymphocytic leukemia (CLL), myelodysplastic syndrome. In one embodiment, the mutant biomarker associated with cancer is located in at least one of the genes provided in Table 1.

[0050] In some embodiments, one or more mutant oncology sequences of the methods are located in at least one of the genes selected from Table 1. In some embodiments the one or more mutant sequences indicate cancer activity.

[0051] In some embodiments the one or more mutant sequences of the methods indicate a patient's likelihood to respond to a therapeutic agent. In some embodiments, the one or more mutant oncology biomarker sequences indication a patient's likelihood to not be responsive to a therapeutic agent. In certain embodiments, relevant therapeutic agents can be oncology therapies including but not limited to kinase inhibitors, cell signaling inhibitors, checkpoint blockades, T cell therapies, and therapeutic vaccines.

[0052] In some embodiments, target sequences or mutant target sequences of the methods are directed to mutations associated with cancer. In some embodiments, the target sequences or mutant target sequences of the methods are directed to mutations associated with one or more solid tumor cancers selected from the group consisting of head and neck cancers (e.g., HNSCC, nasopharyngeal, salivary gland), brain cancer (e.g., glioblastoma, glioma, gliosarcoma, glioblastoma multiforme, neuroblastoma), breast cancer (e.g., TNBC, trastuzumab resistant HER2+ breast cancer, ER+/HER− breast cancer), gynecological (e.g., uterine, ovarian cancer, cervical cancer, endometrial cancer, fallopian cancer), colorectal cancer, gallbladder cancer, esophageal cancer, gastrointestinal cancer, gastric cancer, bladder cancer, prostate cancer, testicular cancer, urothelial cancer, liver cancer (e.g., hepatocellular, HCC), lung cancer (e.g., non-small cell lung, small cell lung), kidney (renal cell) cancer, pancreatic cancer (e.g., adenocarcinoma, ductal), thyroid cancer, bile duct cancer, pituitary tumor, Wilms tumor, Kaposi sarcoma, hairy cell carcinoma, osteosarcoma, thymus cancer, skin cancer, melanoma, heart cancer, oral and larynx cancer, neuroblastoma, mesothelioma, and other solid tumors (thymic, bone, soft tissue, oral SCC, myelofibrosis, synovial sarcoma). In one embodiment, the mutations can include substitutions, insertions, inversions, point mutations, deletions, mismatches and translocations. In one embodiment, the mutations can include variation in copy number. In one embodiment, the mutations can include germline or somatic mutations. In some embodiments, the target sequences or amplified target sequences are directed to sequences having mutations associated with one or more blood/hematologic cancers selected from the group consisting of multiple myeloma, diffuse large B cell lymphoma (DLBCL), lymphoma, Hodgkins lymphoma, non-Hodgkins lymphoma, follicular lymphoma, leukemia, acute myeloid leukemia (AML), chronic lymphocytic leukemia (CLL), myelodysplastic syndrome.

[0053] In one embodiment, the mutations associated with cancer are located in at least one of the genes provided in Table 1. In some embodiments, mutant target sequences are directed to any one of more of the genes provided in Table 1. In some embodiments, mutant target sequences comprise any one or more amplicon sequences of the genes provided in Table 1. In some embodiments, mutant target sequences consist of any one or more amplicon sequences of the genes provided in Table 1. In some embodiments, mutant target sequences include amplicon sequences of each of the genes provided in Table 1.

[0054] In some embodiments, methods comprise use of any one or more of oncology target-specific primer pairs provided in Table A. In some embodiments, methods comprise use of all of the oncology target-specific primer pairs provided in Table A. In some embodiments, use of any one or more of the oncology target-specific primer pairs provided in Table A can be used to amplify a target sequence present in a sample as disclosed by the methods described herein.

[0055] In some embodiments, methods comprise use of the oncology target-specific primers from Table A include 2, 3, 4, 5, 6, 7, 8, 9, 10, 20, 40, 60, 80, 100, 150, 200, 250, 300, 350, 400, 450, 500, 550, 600 or more, target-specific primer pairs. In some embodiments, methods comprising detection of amplified target sequences can include any one or more of the amplified target sequences produced using target-specific primers provided in Table A. In some embodiments, methods comprise use of at least one of the target-specific primers associated with cancer is at least 90% identical to at least one nucleic acid sequence produced using target specific primers selected from SEQ ID NOs: 1-1559. In some embodiments, at least one of the target-specific primers associated with oncology is complementary across its entire length to at least one target sequence in a sample. In some embodiments, at least one of the target-specific primers includes a non-cleavable nucleotide at the 3′ end. In some embodiments, the non-cleavable nucleotide at the 3′ end includes the terminal 3′ nucleotide. In one embodiment, the amplified target sequences are directed to one or more individual exons having mutations associated with cancer. In one embodiment, the amplified target sequences are of the methods are directed to individual exons having a mutation associated with cancer.

[0056] In some embodiments, methods comprise detection and optionally, the identification of clinically actionable markers. As defined herein, the term “clinically actionable marker” includes clinically actionable mutations and/or clinically actionable expression patterns that are known or can be associated by one of ordinary skill in the art with, but not limited to, prognosis for the treatment of cancer. In one embodiment, prognosis for the treatment of cancer includes the identification of mutations and/or expression patterns associated with responsiveness or non-responsiveness of a cancer to a drug, drug combination, or treatment regime. In one embodiment, methods comprise amplification of a plurality of target sequences from a population of nucleic acid molecules linked to, or correlated with, the onset, progression or remission of cancer. In some embodiments, provided methods comprise selective amplification of more than one target sequences in a sample and the detection and/or identification of mutations associated with cancer. In some embodiments, the amplified target sequences include two or more nucleotide sequences of the genes provided in Table 1. In some embodiments, the amplified target sequences can include any one or more the amplified target sequences generated using the target-specific primers provided in Table A. In one embodiment, the amplified target sequences include 10, 50, 100, 150, 200, 250, 300, 350, 400, 450, 500, 550, 600 or more amplicons of the genes from Table 1.

[0057] In one aspect of the invention, methods for preparing a library of target nucleic acid sequences are provided. In some embodiments, methods comprise contacting a nucleic acid sample with a plurality of adaptors capable of amplification of one or more target nucleic acid sequences in the sample under conditions wherein the target nucleic acid(s) undergo a first amplification; digesting resulting first amplification products to reduce or eliminate resulting primer dimers and prepare partially digested target amplicons, thereby producing gapped, double stranded amplicons. The methods further comprise repairing the partially digested target amplicons; then amplifying the repaired target amplicons in a second amplification using universal primers, thereby producing a library of target nucleic acid sequences. Each of the plurality of adaptors used in the methods herein comprise a universal handle sequence and a target nucleic acid sequence and a cleavable moiety and optionally one or more tag sequences. At least two and up to one hundred thousand target specific adaptor pairs are included in the provided methods, wherein the target nucleic acid sequence of each adaptor includes at least one cleavable moiety and the universal handle sequence does not include the cleavable moiety. In some embodiments where an optional tag sequence is included in at least one adaptor, the cleavable moieties are included in the adaptor sequence flanking either end of the tag sequence.

[0058] In one aspect of the invention, methods for preparing a tagged library of target nucleic acid sequences are provided. In some embodiments, methods comprise contacting a nucleic acid sample with a plurality of adaptors capable of amplification of one or more target nucleic acid sequences in the sample under conditions wherein the target nucleic acid(s) undergo a first amplification; digesting resulting first amplification products to reduce or eliminate resulting primer dimers and prepare partially digested target amplicons, thereby producing gapped, double stranded amplicons. The methods further comprise repairing the partially digested target amplicons; then amplifying the repaired target amplicons in a second amplification using universal primers, thereby producing a library of target nucleic acid sequences. Each of the plurality of adaptors used in the methods herein comprise a universal handle sequence and a target nucleic acid sequence and a cleavable moiety and one or more tag sequences. At least two and up to one hundred thousand target specific adaptor pairs are included in the provided methods, wherein the target nucleic acid sequence of each adaptor includes at least one cleavable moiety, the universal handle sequence does not include the cleavable moiety, and the cleavable moieties are included flanking either end of the tag sequence.

[0059] In certain embodiments, the comparable maximal minimum melting temperature of each universal sequence is higher than the comparable maximal minimum melting temperature of each target nucleic acid sequence and each tag sequence present in an adaptor.

[0060] In some embodiments, each of the adaptors comprise unique tag sequences as further described herein and each further comprise cleavable groups flanking either end of the tag sequence in each adaptor. In some embodiments wherein unique tag sequences are employed, each generated target specific amplicon sequence includes at least one different sequence and up to 10′ different sequences. In certain embodiments each target specific pair of the plurality of adaptors includes up to 16,777,216 different adaptor combinations comprising different tag sequences.

[0061] In some embodiments, methods comprise contacting the plurality of gapped polynucleotide products with digestion and repair reagents simultaneously. In some embodiments, methods comprise contacting the plurality of gapped polynucleotide products sequentially with the digestion then repair reagents.

[0062] A digestion reagent useful in the methods provided herein comprises any reagent capable of cleaving the cleavable site present in adaptors, and in some embodiments includes, but is not limited to, one or a combination of uracil DNA glycosylase (UDG). apurinic endonuclease (e.g., APE1), RecJf, formamidopyrimidine [fapy]-DNA glycosylase (fpg), Nth endonuclease III, endonuclease VIII, polynucleotide kinase (PNK), Taq DNA polymerase, DNA polymerase I, and/or human DNA polymerase beta.

[0063] A repair reagent useful in the methods provided herein comprises any reagent capable of repair of the gapped amplicons, and in some embodiments includes, but is not limited to, any one or a combination of Phusion DNA polymerase, Phusion U DNA polymerase, SuperFi DNA polymerase, Taq DNA polymerase, Human DNA polymerase beta, T4 DNA polymerase and/or T7 DNA polymerase, SuperFiU DNA polymerase, E. coli DNA ligase, T3 DNA ligase, T4 DNA ligase, T7 DNA ligase, Taq DNA ligase, and/or 9°N DNA ligase.

[0064] Thus, in certain embodiments, a digestion and repair reagent comprises any one or a combination of uracil DNA glycosylase (UDG), apurinic endonuclease (e.g., APE1), RecJf, formamidopyrimidine [fapy]-DNA glycosylase (fpg), Nth endonuclease III, endonuclease VIII, polynucleotide kinase (PNK), Taq DNA polymerase, DNA polymerase I and/or human DNA polymerase beta; and any one or a combination of Phusion DNA polymerase, Phusion U DNA polymerase, SuperFi DNA polymerase, Taq DNA polymerase, Human DNA polymerase beta, T4 DNA polymerase and/or T7 DNA polymerase, SuperFiU DNA polymerase, E. co/i DNA ligase, T3 DNA ligase, T4 DNA ligase, T7 DNA ligase, Taq DNA ligase, and/or 9°N DNA ligase. In certain embodiments, a digestion and repair reagent comprises any one or a combination of uracil DNA glycosylase (UDG), apurinic endonuclease (e.g., APE1), Taq DNA polymerase, Phusion U DNA polymerase, SuperFiU DNA polymerase, T7 DNA ligase. In certain embodiments, a digestion and repair reagent comprises any one or a combination of uracil DNA glycosylase (UDG), formamidopyrimidine [fapy]-DNA glycosylase (fpg), Phusion U DNA polymerase, Taq DNA polymerase, SuperFiU DNA polymerase, T4 PNK and T7 DNA ligase.

[0065] In some embodiments, methods comprise the digestion and repair steps carried out in a single step. In other embodiments, methods comprise the digestion and repair of steps carried out in a temporally separate manner at different temperatures.

[0066] In some embodiments methods of the invention are carried out wherein one or more of the method steps is conducted in manual mode. In particular embodiments, methods of the invention are carried out wherein each of the method steps is conducted manually. In some embodiments methods of the invention are carried out wherein one or more of the method steps is conducted in an automated mode. In particular embodiments, methods of the invention are carried wherein each of the method steps is automated. In some embodiments methods of the invention are carried out wherein one or more of the method steps is conducted in a combination of manual and automated modes.

[0067] In some embodiments, methods of the invention comprise at least one purification step. For example, in certain embodiments a purification step is carried out only after the second amplification of repaired amplicons. In some embodiments two purification steps are utilized, wherein a first purification step is carried out after the digestion and repair and a second purification step is carried out after the second amplification of repaired amplicons.

[0068] In some embodiments a purification step comprises conducting a solid phase adherence reaction, solid phase immobilization reaction or gel electrophoresis. In certain embodiments a purification step comprises separation conducted using Solid Phase Reversible Immobilization (SPRI) beads. In particular embodiments a purification step comprises separation conducted using SPRI beads wherein the SPRI beads comprise paramagnetic beads.

[0069] In some embodiments, methods comprise contacting a nucleic acid sample with a plurality of adaptors capable of amplification of one or more target nucleic acid sequences in the sample under conditions wherein the target nucleic acid(s) undergo a first amplification; digesting resulting first amplification products to reduce or eliminate resulting primer dimers and prepare partially digested target amplicons, thereby producing gapped, double stranded amplicons. The methods further comprise repairing the partially digested target amplicons, then purifying repaired amplicons; then amplifying the repaired target amplicons in a second amplification using universal primers, thereby producing a library of target nucleic acid sequences; and then purifying resulting library. Each of the plurality of adaptors used in the methods herein comprise a universal handle sequence and a target nucleic acid sequence and a cleavable moiety and optionally one or more tag sequences. At least two and up to one hundred thousand target specific adaptor pairs are included in the provided methods, wherein the target nucleic acid sequence of each adaptor includes at least one cleavable moiety and the universal handle sequence does not include the cleavable moiety. In some embodiments where an optional tag sequence is included in at least one adaptor, the cleavable moieties are included in the adaptor sequence flanking either end of the tag sequence.

[0070] In some embodiments, methods comprise contacting a nucleic acid sample with a plurality of adaptors capable of amplification of one or more target nucleic acid sequences in the sample under conditions wherein the target nucleic acid(s) undergo a first amplification; digesting resulting first amplification products to reduce or eliminate resulting primer dimers and prepare partially digested target amplicons, thereby producing gapped, double stranded amplicons. The methods further comprise repairing the partially digested target amplicons, and purifying repaired amplicons; then amplifying the repaired target amplicons in a second amplification using universal primers, thereby producing a library of target nucleic acid sequences; and then purifying resulting library. Each of the plurality of adaptors used in the methods herein comprise a universal handle sequence and a target nucleic acid sequence and a cleavable moiety and one or more tag sequences. At least two and up to one hundred thousand target specific adaptor pairs are included in the provided methods, wherein the target nucleic acid sequence of each adaptor includes at least one cleavable moiety, the universal handle sequence does not include the cleavable moiety, and cleavable moieties are included in the flanking either end of the tag sequence.

[0071] In some embodiments, methods comprise contacting a nucleic acid sample with a plurality of adaptors capable of amplification of one or more target nucleic acid sequences in the sample under conditions wherein the target nucleic acid(s) undergo a first amplification; digesting resulting first amplification products to reduce or eliminate resulting primer dimers and prepare partially digested target amplicons, thereby producing gapped, double stranded amplicons. The methods further comprise repairing the partially digested target amplicons, then purifying repaired amplicons; then amplifying the repaired target amplicons in a second amplification using universal primers, thereby producing a library of target nucleic acid sequences; and then purifying resulting library. Each of the plurality of adaptors used in the methods herein comprise a universal handle sequence and a target nucleic acid sequence and a cleavable moiety and optionally one or more tag sequences. At least two and up to one hundred thousand target specific adaptor pairs are included in the provided methods, wherein the target nucleic acid sequence of each adaptor includes at least one cleavable moiety and the universal handle sequence does not include the cleavable moiety. In some embodiments where an optional tag sequence is included in at least one adaptor, the cleavable moieties are included in the adaptor sequence flanking either end of the tag sequence. In some embodiments a digestion and repair reagent comprises any one or a combination of uracil DNA glycosylase (UDG), apurinic endonuclease (e.g., APE1), RecJf, formamidopyrimidine [fapy]-DNA glycosylase (fpg), Nth endonuclease III, endonuclease VIII, polynucleotide kinase (PNK), Taq DNA polymerase, DNA polymerase I and/or human DNA polymerase beta; and any one or a combination of Phusion DNA polymerase, Phusion U DNA polymerase, SuperFi DNA polymerase, Taq DNA polymerase, Human DNA polymerase beta, T4 DNA polymerase and/or T7 DNA polymerase, SuperFiU DNA polymerase, E. coli DNA ligase, T3 DNA ligase, T4 DNA ligase, T7 DNA ligase, Taq DNA ligase, and/or 9° N DNA ligase. In certain embodiments, a digestion and repair reagent comprises any one or a combination of uracil DNA glycosylase (UDG), apurinic endonuclease (e.g., APE1), Taq DNA polymerase, Phusion U DNA polymerase, SuperFiU DNA polymerase, T7 DNA ligase. In certain embodiments, a digestion and repair reagent comprises any one or a combination of uracil DNA glycosylase (UDG), formamidopyrimidine [fapy]-DNA glycosylase (fpg), Phusion U DNA polymerase, Taq DNA polymerase, SuperFiU DNA polymerase, T4 PNK and T7 DNA ligase.

[0072] In some embodiments, methods comprise contacting a nucleic acid sample with a plurality of adaptors capable of amplification of one or more target nucleic acid sequences in the sample under conditions wherein the target nucleic acid(s) undergo a first amplification; digesting resulting first amplification products to reduce or eliminate resulting primer dimers and prepare partially digested target amplicons, thereby producing gapped, double stranded amplicons. The methods further comprise repairing the partially digested target amplicons, and purifying repaired amplicons; then amplifying the repaired target amplicons in a second amplification using universal primers, thereby producing a library of target nucleic acid sequences; and then purifying resulting library. Each of the plurality of adaptors used in the methods herein comprise a universal handle sequence and a target nucleic acid sequence and a cleavable moiety and one or more tag sequences. At least two and up to one hundred thousand target specific adaptor pairs are included in the provided methods, wherein the target nucleic acid sequence of each adaptor includes at least one cleavable moiety, the universal handle sequence does not include the cleavable moiety, and cleavable moieties are included in the flanking either end of the tag sequence. In some embodiments a digestion and repair reagent comprises any one or a combination of one or a combination of uracil DNA glycosylase (UDG), apurinic endonuclease (e.g., APE1), RecJf, formamidopyrimidine [fapy]-DNA glycosylase (fpg), Nth endonuclease III, endonuclease VIII, polynucleotide kinase (PNK), Taq DNA polymerase, DNA polymerase I and/or human DNA polymerase beta; and any one or a combination of Phusion DNA polymerase, Phusion U DNA polymerase, SuperFi DNA polymerase, Taq DNA polymerase, Human DNA polymerase beta, T4 DNA polymerase and/or T7 DNA polymerase, SuperFiU DNA polymerase, E. coli DNA ligase, T3 DNA ligase, T4 DNA ligase, T7 DNA ligase, Taq DNA ligase, and/or 9° N DNA ligase. In certain embodiments, a digestion and repair reagent comprises any one or a combination of uracil DNA glycosylase (UDG), apurinic endonuclease (e.g., APE1), Taq DNA polymerase, Phusion U DNA polymerase, SuperFiU DNA polymerase, T7 DNA ligase. In certain embodiments, a digestion and repair reagent comprises any one or a combination of uracil DNA glycosylase (UDG), formamidopyrimidine [fapy]-DNA glycosylase (fpg), Phusion U DNA polymerase, Taq DNA polymerase, SuperFiU DNA polymerase, T4 PNK and T7 DNA ligase.

[0073] In certain embodiments methods of the invention are carried out in a single, addition only workflow reaction, allowing for rapid production of highly multiplexed targeted libraries. For example, in one embodiment, methods for preparing a library of target nucleic acid sequences comprise contacting a nucleic acid sample with a plurality of adaptors capable of amplification of one or more target nucleic acid sequences in the sample under conditions wherein the target nucleic acid(s) undergo a first amplification; digesting resulting first amplification products to reduce or eliminate resulting primer dimers and prepare partially digested target amplicons, thereby producing gapped, double stranded amplicons. The methods further comprise repairing the partially digested target amplicons; then amplifying the repaired target amplicons in a second amplification using universal primers, thereby producing a library of target nucleic acid sequences, and purifying the resulting library. In certain embodiments the purification comprises a single or repeated separating step that is carried out following production of the library following the second amplification; and wherein the other method steps are conducted in a single reaction vessel without requisite transferring of a portion (aliquot) of any of the products generated in steps to another reaction vessel. Each of the plurality of adaptors used in the methods herein comprise a universal handle sequence and a target nucleic acid sequence and a cleavable moiety and optionally one or more tag sequences. At least two and up to one hundred thousand target specific adaptor pairs are included in the provided methods, wherein the target nucleic acid sequence of each adaptor includes at least one cleavable moiety and the universal handle sequence does not include the cleavable moiety. In some embodiments where an optional tag sequence is included in at least one adaptor, the cleavable moieties are included in the adaptor sequence flanking either end of the tag sequence.

[0074] In another embodiment, methods for preparing a tagged library of target nucleic acid sequences are provided comprising contacting a nucleic acid sample with a plurality of adaptors capable of amplification of one or more target nucleic acid sequences in the sample under conditions wherein the target nucleic acid(s) undergo a first amplification; digesting resulting first amplification products to reduce or eliminate resulting primer dimers and prepare partially digested target amplicons, thereby producing gapped, double stranded amplicons. The methods further comprise repairing the partially digested target amplicons; then amplifying the repaired target amplicons in a second amplification using universal primers, thereby producing a library of target nucleic acid sequences, and purifying the resulting library. In certain embodiments the purification comprises a single or repeated separating step; and wherein the other method steps are optionally conducted in a single reaction vessel without requisite transferring of a portion of any of the products generated in steps to another reaction vessel. Each of the plurality of adaptors used in the methods herein comprise a universal handle sequence and a target nucleic acid sequence and a cleavable moiety and one or more tag sequences. At least two and up to one hundred thousand target specific adaptor pairs are included in the provided methods, wherein the target nucleic acid sequence of each adaptor includes at least one cleavable moiety, the universal handle sequence does not include the cleavable moiety, and the cleavable moieties are included flanking either end of the tag sequence.

[0075] In one embodiment, methods for preparing a library of target nucleic acid sequences comprise contacting a nucleic acid sample with a plurality of adaptors capable of amplification of one or more target nucleic acid sequences in the sample under conditions wherein the target nucleic acid(s) undergo a first amplification; digesting resulting first amplification products to reduce or eliminate resulting primer dimers and prepare partially digested target amplicons, thereby producing gapped, double stranded amplicons. The methods further comprise repairing the partially digested target amplicon; then amplifying the repaired target amplicons in a second amplification using universal primers, thereby producing a library of target nucleic acid sequences, and purifying the resulting library.

[0076] In some embodiments a digestion reagent comprises any one or any combination of: uracil DNA glycosylase (UDG), AP endonuclease (APE1), RecJf, formamidopyrimidine [fapy]-DNA glycosylase (fpg), Nth endonuclease III, endonuclease VIII, polynucleotide kinase, Taq DNA polymerase, DNA polymerase I and/or human DNA polymerase beta. In certain embodiments a digestion reagent comprises any one or any combination of: uracil DNA glycosylase (UDG), AP endonuclease (APE1), RecJf, formamidopyrimidine [fapy]-DNA glycosylase (fpg), Nth endonuclease III, endonuclease VIII, polynucleotide kinase, Taq DNA polymerase, DNA polymerase I and/or human DNA polymerase beta wherein the digestion reagent lacks formamidopyrimidine [fapy]-DNA glycosylase (fpg).

[0077] In some embodiments a digestion reagent comprises a single-stranded DNA exonuclease that degrades in a 5′-3′ direction. In some embodiments a cleavage reagent comprises a single-stranded DNA exonuclease that degrades abasic sites. In some embodiments herein the digestions reagent comprises an RecJf exonuclease. In particular embodiments a digestion reagent comprises APE1 and RecJf, wherein the cleavage reagent comprises an apurinic/apyrimidinic endonuclease. In certain embodiments the digestion reagent comprises an AP endonuclease (APE1).

[0078] In some embodiments a repair reagent comprises at least one DNA polymerase; wherein the gap-filling reagent comprises: any one or any combination of: Phusion DNA polymerase, Phusion U DNA polymerase, SuperFi DNA polymerase, Taq DNA polymerase, Human DNA polymerase beta, T4 DNA polymerase and/or T7 DNA polymerase and/or SuperFi U DNA polymerase. In some embodiments a repair reagent further comprises a plurality of nucleotides.

[0079] In some embodiment a repair reagent comprises an ATP-dependent or an ATP-independent ligase; wherein the repair reagent comprises any one or any combination of: E. coli DNA ligase, T3 DNA ligase, T4 DNA ligase, T7 DNA ligase, Taq DNA ligase, 9° N DNA ligase

[0080] In certain embodiments a digestion and repair reagent comprises any one or a combination of uracil DNA glycosylase (UDG), apurinic endonuclease (e.g., APE1), RecJf, formamidopyrimidine [fapy]-DNA glycosylase (fpg), Nth endonuclease III, endonuclease VIII, polynucleotide kinase (PNK), Taq DNA polymerase, DNA polymerase I and/or human DNA polymerase beta; and any one or a combination of Phusion DNA polymerase, Phusion U DNA polymerase, SuperFi DNA polymerase, Taq DNA polymerase, Human DNA polymerase beta, T4 DNA polymerase and/or T7 DNA polymerase, SuperFiU DNA polymerase, E. coli DNA ligase, T3 DNA ligase, T4 DNA ligase, T7 DNA ligase, Taq DNA ligase, and/or 9° N DNA ligase. In particular embodiments, a digestion and repair reagent comprises any one or a combination of uracil DNA glycosylase (UDG), apurinic endonuclease (e.g., APE1), Taq DNA polymerase, Phusion U DNA polymerase, SuperFiU DNA polymerase, T7 DNA ligase. In certain embodiments a purification comprises a single or repeated separating step that is carried out following production of the library following the second amplification; and wherein method steps are conducted in a single reaction vessel without requisite transferring of a portion of any of the products generated in steps to another reaction vessel until a first purification. Each of the plurality of adaptors used in the methods herein comprise a universal handle sequence and a target nucleic acid sequence and a cleavable moiety and optionally one or more tag sequences. At least two and up to one hundred thousand target specific adaptor pairs are included in the provided methods, wherein the target nucleic acid sequence of each adaptor includes at least one cleavable moiety and the universal handle sequence does not include the cleavable moiety. In some embodiments where an optional tag sequence is included in at least one adaptor, the cleavable moieties are included in the adaptor sequence flanking either end of the tag sequence.

[0081] In another embodiment, methods for preparing a tagged library of target nucleic acid sequences are provided comprising contacting a nucleic acid sample with a plurality of adaptors capable of amplification of one or more target nucleic acid sequences in the sample under conditions wherein the target nucleic acid(s) undergo a first amplification; digesting resulting first amplification products to reduce or eliminate resulting primer dimers and prepare partially digested target amplicons, thereby producing gapped, double stranded amplicons. The methods further comprise repairing the partially digested target amplicons; then amplifying the repaired target amplicons in a second amplification using universal primers, thereby producing a library of target nucleic acid sequences, and purifying the resulting library. In certain embodiments a digestion and repair reagent comprises any one or a combination of uracil DNA glycosylase (UDG), apurinic endonuclease (e.g., APE1), RecJf, formamidopyrimidine [fapy]-DNA glycosylase (fpg), Nth endonuclease III, endonuclease VIII, polynucleotide kinase (PNK), Taq DNA polymerase, DNA polymerase I and/or human DNA polymerase beta; and any one or a combination of Phusion DNA polymerase, Phusion U DNA polymerase, SuperFi DNA polymerase, Taq DNA polymerase, Human DNA polymerase beta, T4 DNA polymerase and/or T7 DNA polymerase, SuperFiU DNA polymerase, E. coli DNA ligase, T3 DNA ligase, T4 DNA ligase, T7 DNA ligase, Taq DNA ligase, and/or 9° N DNA ligase. In particular embodiments, a digestion and repair reagent comprises any one or a combination of uracil DNA glycosylase (UDG), apurinic endonuclease (e.g., APE1), Taq DNA polymerase, Phusion U DNA polymerase, SuperFiU DNA polymerase, T7 DNA ligase. In certain embodiments the purification comprises a single or repeated separating step that is carried out following production of the library following the second amplification; and wherein steps the other method steps are conducted in a single reaction vessel without requisite transferring of a portion (aliquot) of any of the products generated in steps to another reaction vessel. Each of the plurality of adaptors used in the methods herein comprise a universal handle sequence and a target nucleic acid sequence and a cleavable moiety and one or more tag sequences.

[0082] At least two and up to one hundred thousand target specific adaptor pairs are included in the provided methods, wherein the target nucleic acid sequence of each adaptor includes at least one cleavable moiety, the universal handle sequence does not include the cleavable moiety, and the cleavable moieties are included flanking either end of the tag sequence.

[0083] In some embodiments, adaptor-dimer byproducts resulting from the first amplification of step of the methods are largely removed from the resulting library. In certain embodiments the enriched population of amplified target nucleic acids contains a reduced amount of adaptor-dimer byproduct. In particular embodiments adaptor dimer byproducts are eliminated.

[0084] In some embodiments, the library is prepared in less than 4 hours. In some embodiments, the library is prepared, enriched and sequenced in less than 3 hours. In some embodiments, the library is prepared, enriched and sequenced in 2 to 3 hours. In some embodiments, the library is prepared in approximately 2.5 hours. In some embodiments, the library is prepared in approximately 2.75 hours. In some embodiments, the library is prepared in approximately 3 hours.

### Compositions

[0085] Additional aspects of the invention comprise compositions comprising a plurality of nucleic acid adaptors, as well as library compositions prepared according to the methods of the invention. Provided compositions are useful in conjunction with the methods described herein as well as for additional analysis and applications known in the art.

[0086] Thus, provided are compositions comprising a plurality of nucleic acid adaptors, wherein each of the plurality of adaptors comprises a 5′ universal handle sequence, optionally one or more tag sequences, and a 3′ target nucleic acid sequence wherein each adaptor comprises a cleavable moiety, wherein the target nucleic acid sequence of the adaptor includes at least one cleavable moiety, and when tag sequences are present cleavable moieties are included flanking either end of the tag sequence and wherein the universal handle sequence does not include the cleavable moiety. At least two and up to one hundred thousand target specific adaptor pairs are included in provided compositions. Provided compositions allow for rapid production of highly multiplexed targeted libraries.

[0087] In some embodiments, provided compositions comprise a plurality of nucleic acid adaptors, wherein each of the plurality of adaptors comprise a 5′ universal handle sequence, one or more tag sequences, and a 3′ target nucleic acid sequence wherein each adaptor comprises a cleavable moiety; wherein the target nucleic acid sequence of the adaptor includes at least one cleavable moiety, cleavable moieties are included flanking either end of the tag sequence and the universal handle sequence does not include the cleavable moiety. At least two and up to one hundred thousand target specific adaptor pairs are included in provided compositions. Provided composition allow for rapid production of highly multiplexed, tagged, targeted libraries.

[0088] Primer/adaptor compositions may be single stranded or double stranded. In some embodiments adaptor compositions comprise are single stranded adaptors. In some embodiments adaptor compositions comprise double stranded adaptors. In some embodiments adaptor compositions comprise a mixture of single stranded and double stranded adaptors.

[0089] In some embodiments, compositions include a plurality of adaptors capable of amplification of one or more target nucleic acid sequences comprising a multiplex of adaptor pairs capable of amplification of at least two different target nucleic acid sequences wherein the target-specific primer sequence is substantially non-complementary to other target specific primer sequences in the composition. In some embodiments, the composition comprises at least 25, 50, 75, 100, 150, 200, 250, 300, 350, 400, 450, 500, 750, 1000, 1250, 1500, 1750, 2000, 2250, 2500, 2750, 3000, 3250, 3500, 3750, 4000, 4500, 5000, 5500, 6000, 7000, 8000, 9000, 10,000, 11,000, or 12,000, or more target-specific adaptor pairs. In some embodiments, target-specific adaptor pairs comprise about 15 nucleotides to about 40 nucleotides in length, wherein at least one nucleotide is replaced with a cleavable group. In some embodiments the cleavable group is a uridine nucleotide. In some embodiments, the target-specific adaptor pairs are designed to amplify an exon, gene, exome or region of the genome associated with a clinical or pathological condition, e.g., amplification of one or more sites comprising one or more mutations (e.g., driver mutation) associated with a cancer, e.g., lung, colon, breast cancer, etc., or amplification of mutations associated with an inherited disease, e.g., cystic fibrosis, muscular dystrophies, etc. In some embodiments, the target-specific adaptor pairs when hybridized to a target sequence and amplified as provided herein generates a library of adaptor-ligated amplified target sequences that are about 100 to about 600 base pairs in length. In some embodiments, no one adaptor-ligated amplified target sequence is overexpressed in the library by more than 30% as compared to the remainder of other adaptor-ligated amplified target sequences in the library. In some embodiments, an adaptor-ligated amplified target sequence library is substantially homogenous with respect to GC content, amplified target sequence length or melting temperature (Tm) of the respective target sequences.

[0090] In some embodiments, the target-specific primer sequences of adaptor pairs in the compositions of the invention are target-specific sequences that can amplify specific regions of a nucleic acid molecule. In some embodiments, the target-specific adaptors can amplify genomic DNA or cDNA. In some embodiments, target-specific adaptors can amplify mammalian nucleic acid, such as, but not limited to human DNA or RNA, murine DNA or RNA, bovine DNA or RNA, canine DNA or RNA, equine DNA or RNA, or any other mammal of interest. In other embodiments, target specific adaptors include sequences directed to amplify plant nucleic acids of interest. In other embodiments, target specific adaptors include sequences directed to amplify infectious agents, e.g., bacterial and/or viral nucleic acids. In some embodiments, the amount of nucleic acid required for selective amplification is from about 1 ng to 1 microgram. In some embodiments, the amount of nucleic acid required for selective amplification of one or more target sequences is about 1 ng, about 5 ng or about 10 ng. In some embodiments, the amount of nucleic acid required for selective amplification of target sequence is about 10 ng to about 200 ng.

[0091] As described herein, each of the plurality of adaptors comprises a 5′ universal handle sequence. In some embodiments a universal handle sequence comprises any one or any combination of an amplification primer binding sequence, a sequencing primer binding sequence and/or a capture primer binding sequence. In some embodiments the comparable maximal minimum melting temperatures of each adaptor universal handle sequence is higher than the comparable maximal minimum melting temperatures of each target nucleic acid sequence and each tag sequence present in the same adaptor. Preferably, the universal handle sequences of provided adaptors do not exhibit significant complementarity and/or hybridization to any portion of a unique tag sequence and/or target nucleic acid sequence of interest. In some embodiments a first universal handle sequence comprises any one or any combination of an amplification primer binding sequence, a sequencing primer binding sequence and/or a capture primer binding sequence. In some embodiments a second universal handle sequence comprises any one or any combination of an amplification primer binding sequence, a sequencing primer binding sequence and/or a capture primer binding sequence. In certain embodiments first and second universal handle sequences correspond to forward and reverse universal handle sequences and in certain embodiments the same first and second universal handle sequences are included for each of the plurality of target specific adaptor pairs. Such forward and reverse universal handle sequences are targeted in conjunction with universal primers to carry out a second amplification of repaired amplicons in production of libraries according to methods of the invention. In certain embodiments a first 5′ universal handle sequence comprises two universal handle sequences(e.g., a combination of an amplification primer binding sequence, a sequencing primer binding sequence and/or a capture primer binding sequence); and a second 5′ universal sequence comprises two universal handle sequences (e.g., a combination of an amplification primer binding sequence, a sequencing primer binding sequence and/or a capture primer binding sequence), wherein the 5′ first and second universal handle sequences do not exhibit significant hybridization to any portion of a target nucleic acid sequence of interest.

[0092] The structure and properties of universal amplification primers or universal primers are well known to those skilled in the art and can be implemented for utilization in conjunction with provided methods and compositions to adapt to specific analysis platforms. Universal handle sequences of the adaptors provided herein are adapted accordingly to accommodate a preferred universal primer sequences. For example, e.g., as described herein universal P1 and A primers with optional barcode sequences have been described in the art and utilized for sequencing on Ion Torrent sequencing platforms (Ion Xpress™ Adapters, Thermo Fisher Scientific). Similarly, additional and other universal adaptor/primer sequences described and known in the art (e.g., Illumina universal adaptor/primer sequences can be found, e.g., at support.illumina.com/content/dam/illumina-support/documents/documentation/chemistry_documentation/experiment-design/illumina-adapter-sequences_1000000002694-01.pdf; PacBio universal adaptor/primer sequences, can be found, e.g., at s3.amazonaws.com/files.pacb.com/pdf/Guide_Pacific_Biosciences_Template_Preparation_and_Sequencing. pdf; etc.) can be used in conjunction with the methods and compositions provided herein. Suitable universal primers of appropriate nucleotide sequence for use with adaptors of the invention are readily prepared using standard automated nucleic acid synthesis equipment and reagents in routine use in the art. One single type of universal primer or separate types (or even a mixture) of two different universal primers, for example a pair of universal amplification primers suitable for amplification of repaired amplicons in a second amplification are included for use in the methods of the invention. Universal primers optionally include a different tag (barcode) sequence, where the tag (barcode) sequence does not hybridize to the adaptor. Barcode sequences incorporated into amplicons in a second universal amplification can be utilized e.g., for effective identification of sample source.

[0093] In some embodiments adaptors further comprise a unique tag sequence located between the 5′ first universal handle sequence and the 3′ target-specific sequence, and wherein the unique tag sequence does not exhibit significant complementarity and/or hybridization to any portion of a unique tag sequence and/or target nucleic acid sequence of interest. In some embodiments the plurality of primer adaptor pairs has 10⁴-10⁹ different tag sequence combinations. Thus in certain embodiments each generated target specific adaptor pair comprises 10⁴-10⁹ different tag sequences. In some embodiments the plurality of primer adaptors comprise each target specific adaptor comprising at least one different unique tag sequence and up to 10⁵ different unique tag sequences. In some embodiments the plurality of primer adaptors comprise each target specific adaptor comprising at least one different unique tag sequence and up to 10⁵ different unique tag sequences. In certain embodiments each generated target specific amplicon generated comprises at least two and up to 10⁹ different adaptor combinations comprising different tag sequences, each having two different unique tag sequences. In some embodiments the plurality of primer adaptors comprise each target specific adaptor comprising 4096 different tag sequences. In certain embodiments each generated target specific amplicon generated comprises up to 16,777,216 different adaptor combinations comprising different tag sequences, each having two different unique tag sequences.

[0094] In some embodiments individual primer adaptors in the plurality of adaptors include a unique tag sequence (e.g., contained in a tag adaptor) comprising different random tag sequences alternating with fixed tag sequences. In some embodiments, the at least one unique tag sequence comprises a at least one random sequence and at least one fixed sequence, or comprises a random sequence flanked on both sides by a fixed sequence, or comprises a fixed sequence flanked on both sides by a random sequence. In some embodiments a unique tag sequence includes a fixed sequence that is 2-2000 nucleotides or base-pairs in length. In some embodiments a unique tag sequence includes a random sequence that is 2-2000 nucleotides or base-pairs in length.

[0095] In some embodiments, unique tag sequences include a sequence having at least one random sequence interspersed with fixed sequences. In some embodiments, individual tag sequences in a plurality of unique tags have the structure (N)ₙ(X)ₓ(M)ₘ(Y)_{y}, wherein “N” represents a random tag sequence that is generated from A, G, C, T, U or I, and wherein “n” is 2-10 which represents the nucleotide length of the “N” random tag sequence; wherein “X” represents a fixed tag sequence, and wherein “x” is 2-10 which represents the nucleotide length of the “X” random tag sequence; wherein “M” represents a random tag sequence that is generated from A, G, C, T, U or I, wherein the random tag sequence “M” differs or is the same as the random tag sequence “N”, and wherein “m” is 2-10 which represents the nucleotide length of the “M” random tag sequence; and wherein “Y” represents a fixed tag sequence, wherein the fixed tag sequence of “Y” is the same or differs from the fixed tag sequence of “X”, and wherein “y” is 2-10 which represents the nucleotide length of the “Y” random tag sequence. In some embodiments, the fixed tag sequence “X” is the same in a plurality of tags. In some embodiments, the fixed tag sequence “X” is different in a plurality of tags. In some embodiments, the fixed tag sequence “Y” is the same in a plurality of tags. In some embodiments, the fixed tag sequence “Y” is different in a plurality of tags. In some embodiments, the fixed tag sequences “(X)X” and “(Y)y” within the plurality of adaptors are sequence alignment anchors.

[0096] In some embodiments, the random sequence within a unique tag sequence is represented by “N”, and the fixed sequence is represented by “X”. Thus, a unique tag sequence is represented by N₁N₂N₃X₁X₂X₃ or by N₁N₂N₃X₁X₂X₃N₄N₅N₆X₄X₅X₆. Optionally, a unique tag sequence can have a random sequence in which some or all of the nucleotide positions are randomly selected from a group consisting of A, G, C, T, U and I. For example, a nucleotide for each position within a random sequence is independently selected from any one of A, G, C, T, U or I, or is selected from a subset of these six different types of nucleotides. Optionally, a nucleotide for each position within a random sequence is independently selected from any one of A, G, C or T. In some embodiments, the first fixed tag sequence “X₁X₂X₃” is the same or different sequence in a plurality of tags. In some embodiments, the second fixed tag sequence “X₄X₅X₆” is the same or different sequence in a plurality of tags. In some embodiments, the first fixed tag sequence “X₁X₂X₃” and the second fixed tag sequence “X₄X₅X₆” within the plurality of adaptors are sequence alignment anchors.

[0097] In some embodiments, a unique tag sequence comprises the sequence 5′-NNNACTNNNTGA-3′, where “N” represents a position within the random sequence that is generated randomly from A, G, C or T, the number of possible distinct random tags is calculated to be 4⁶ (or 4∧6) is about 4096, and the number of possible different combinations of two unique tags is 4¹² (or 4∧12) is about 16.78 million. In some embodiments, the underlined portions of 5′-NNNACTNNNTGA-3′ are a sequence alignment anchor.

[0098] In some embodiments, the fixed sequences within the unique tag sequence is a sequence alignment anchor that can be used to generate error-corrected sequencing data. In some embodiments fixed sequences within the unique tag sequence is a sequence alignment anchor that can be used to generate a family of error-corrected sequencing reads.

[0099] Adaptors provided herein comprise at least one cleavable moiety. In some embodiments a cleavable moiety is within the 3′ target-specific sequence. In some embodiments a cleavable moiety is at or near the junction between the 5′ first universal handle sequence and the 3′ target-specific sequence. In some embodiments a cleavable moiety is at or near the junction between the 5′ first universal handle sequence and the unique tag sequence, and at or near the junction between the unique tag sequence and the 3′ target-specific sequence. The cleavable moiety can be present in a modified nucleotide, nucleoside or nucleobase. In some embodiments, the cleavable moiety can include a nucleobase not naturally occurring in the target sequence of interest.

[0100] In some embodiments the at least one cleavable moiety in the plurality of adaptors is a uracil base, uridine or a deoxyuridine nucleotide. In some embodiments a cleavable moiety is within the 3′ target-specific sequence and the junctions between the 5′ universal handle sequence and the unique tag sequence and/or the 3′target specific sequence wherein the at least one cleavable moiety in the plurality of adaptors is cleavable with uracil DNA glycosylase (UDG). In some embodiments, a cleavable moiety is cleaved, resulting in a susceptible abasic site, wherein at least one enzyme capable of reacting on the abasic site generates a gap comprising an extendible 3′ end. In certain embodiments the resulting gap comprises a 5′-deoxyribose phosphate group. In certain embodiments the resulting gap comprises an extendible 3′ end and a 5′ ligatable phosphate group.

[0101] In another embodiment, inosine can be incorporated into a DNA-based nucleic acid as a cleavable group. In one exemplary embodiment, EndoV can be used to cleave near the inosine residue. In another exemplary embodiment, the enzyme hAAG can be used to cleave inosine residues from a nucleic acid creating abasic sites.

[0102] Where a cleavable moiety is present, the location of the at least one cleavable moiety in the adaptors does not significantly change the melting temperature (Tm) of any given double-stranded adaptor in the plurality of double-stranded adaptors. The melting temperatures (Tm) of any two given double-stranded adaptors from the plurality of double-stranded adaptors are substantially the same, wherein the melting temperatures (Tm) of any two given double-stranded adaptors does not differ by more than 10° C. of each other. However, within each of the plurality of adaptors, the melting temperatures of sequence regions differs, such that the comparable maximal minimum melting temperature of, for example, the universal handle sequence, is higher than the comparable maximal minimum melting temperatures of either the unique tag sequence and/or the target specific sequence of any adaptor. This localized differential in comparable maximal minimum melting temperatures can be adjusted to optimize digestion and repair of amplicons and ultimately improved effectiveness of the methods provided herein.

[0103] Further provided are compositions comprising a nucleic acid library generated by methods of the invention. Thus, provided are composition comprising a plurality of amplified target nucleic acid amplicons, wherein each of the plurality of amplicons comprises a 5′ universal handle sequence, optionally a first unique tag sequences, an intermediate target nucleic acid sequence, optionally a second unique tag sequences and a 3′ universal handle sequence. At least two and up to one hundred thousand target specific amplicons are included in provided compositions. Provided compositions include highly multiplexed targeted libraries. In some embodiments, provided compositions comprise a plurality of nucleic acid amplicons, wherein each of the plurality of amplicons comprise a 5′ universal handle sequence, a first unique tag sequences, an intermediate target nucleic acid sequence, a second unique tag sequences and a 3′ universal handle sequence. At least two and up to one hundred thousand target specific tagged amplicons are included in provided compositions. Provided compositions include highly multiplexed tagged targeted libraries.

[0104] In some embodiments, library compositions include a plurality of target specific amplicons comprising a multiplex of at least two different target nucleic acid sequences. In some embodiments, the composition comprises at least 25, 50, 75, 100, 150, 200, 250, 300, 350, 400, 450, 500, 750, 1000, 1250, 1500, 1750, 2000, 2250, 2500, 2750, 3000, 3250, 3500, 3750, 4000, 4500, 5000, 5500, 6000, 7000, 8000, 9000, 10,000, 11,000, or 12,000, or more target-specific amplicons. In some embodiments, the target-specific amplicons comprise one or more exon, gene, exome or region of the genome associated with a clinical or pathological condition, e.g., amplicons comprising one or more sites comprising one or more mutations (e.g., driver mutation) associated with a cancer, e.g., lung, colon, breast cancer, etc., or amplicons comprising mutations associated with an inherited disease, e.g., cystic fibrosis, muscular dystrophies, etc. In some embodiments, the target-specific amplicons comprise a library of adaptor-ligated amplicon target sequences that are about 100 to about 750 base pairs in length.

[0105] As described herein, each of the plurality of amplicons comprises a 5′ universal handle sequence. In some embodiments a universal handle sequence comprises any one or any combination of an amplification primer binding sequence, a sequencing primer binding sequence and/or a capture primer binding sequence. Preferably, the universal handle sequences of provided adaptors do not exhibit significant complementarity and/or hybridization to any portion of a unique tag sequence and/or target nucleic acid sequence of interest. In some embodiments a first universal handle sequence comprises any one or any combination of an amplification primer binding sequence, a sequencing primer binding sequence and/or a capture primer binding sequence. In some embodiments a second universal handle sequence comprises any one or any combination of an amplification primer binding sequence, a sequencing primer binding sequence and/or a capture primer binding sequence. In certain embodiments first and second universal handle sequences correspond to forward and reverse universal handle sequences and in certain embodiments the same first and second universal handle sequences are included for each of the plurality of target specific amplicons. Such forward and reverse universal handle sequences are targeted in conjunction with universal primers to carry out a second amplification of a preliminary library composition in production of resulting amplified according to methods of the invention. In certain embodiments a first 5′ universal handle sequence comprises two universal handle sequences(e.g., a combination of an amplification primer binding sequence, a sequencing primer binding sequence and/or a capture primer binding sequence); and a second 5′ universal sequence comprises two universal handle sequences (e.g., a combination of an amplification primer binding sequence, a sequencing primer binding sequence and/or a capture primer binding sequence), wherein the 5′ first and second universal handle sequences do not exhibit significant hybridization to any portion of a target nucleic acid sequence of interest.

[0106] The structure and properties of universal amplification primers or universal primers are well known to those skilled in the art and can be implemented for utilization in conjunction with provided methods and compositions to adapt to specific analysis platforms. Universal handle sequences of the adaptors and amplicons provided herein are adapted accordingly to accommodate a preferred universal primer sequences. For example, e.g., as described herein universal P1 and A primers with optional barcode sequences have been described in the art and utilized for sequencing on Ion Torrent sequencing platforms (Ion Xpress™ Adapters, Thermo Fisher Scientific). Similarly, additional and other universal adaptor/primer sequences described and known in the art (e.g., Illumina universal adaptor/primer sequences can be found, e.g., at support.illumina.com/content/dam/illumina-support/documents/documentation/chemistry_documentation/experiment-design/illumina-adapter-sequences_1000000002694-01.pdf; PacBio universal adaptor/primer sequences, can be found, e.g., at s3.amazonaws.com/files.pacb.com/pdf/Guide_Pacific_Biosciences_Template_Preparation_and_Sequencing. pdf; etc.) can be used in conjunction with the methods and compositions provided herein. Suitable universal primers of appropriate nucleotide sequence for use with libraries of the invention are readily prepared using standard automated nucleic acid synthesis equipment and reagents in routine use in the art. One single type or separate types (or even a mixture) of two different universal primers, for example a pair of universal amplification primers suitable for amplification of a preliminary library may be used in production of the libraries of the invention. Universal primers optionally include a tag (barcode) sequence, where the tag (barcode) sequence does not hybridize to adaptor sequence or to target nucleic acid sequences. Barcode sequences incorporated into amplicons in a second universal amplification can be utilized e.g., for effective identification of sample source to thereby generate a barcoded library. Thus provided compositions include highly multiplexed barcoded targeted libraries. Provided compositions also include highly multiplexed barcoded tagged targeted libraries.

[0107] In some embodiments amplicon libraries comprise a unique tag sequence located between the 5′ first universal handle sequence and the 3′ target-specific sequence, and wherein the unique tag sequence does not exhibit significant complementarity and/or hybridization to any portion of a unique tag sequence and/or target nucleic acid sequence. In some embodiments the plurality of amplicons has 10⁴-10⁹ different tag sequence combinations. Thus in certain embodiments each of the plurality of amplicons in a library comprises 10⁴-10⁹ different tag sequences. In some embodiments each of the plurality of amplicons in a library comprises at least one different unique tag sequence and up to 10⁵ different unique tag sequences. In certain embodiments each target specific amplicon in a library comprises at least two and up to 10⁹ different combinations comprising different tag sequences, each having two different unique tag sequences. In some embodiments each of the plurality of amplicons in a library comprise a tag sequence comprising 4096 different tag sequences. In certain embodiments each target specific amplicon of a library comprises up to 16,777,216 different combinations comprising different tag sequences, each having two different unique tag sequences.

[0108] In some embodiments individual amplicons in the plurality of amplicons of a library include a unique tag sequence (e.g., contained in a tag adaptor sequence) comprising different random tag sequences alternating with fixed tag sequences. In some embodiments, the at least one unique tag sequence comprises a at least one random sequence and at least one fixed sequence, or comprises a random sequence flanked on both sides by a fixed sequence, or comprises a fixed sequence flanked on both sides by a random sequence.

[0109] In some embodiments a unique tag sequence includes a fixed sequence that is 2-2000 nucleotides or base-pairs in length. In some embodiments a unique tag sequence includes a random sequence that is 2-2000 nucleotides or base-pairs in length.

[0110] In some embodiments, unique tag sequences include a sequence having at least one random sequence interspersed with fixed sequences. In some embodiments, individual tag sequences in a plurality of unique tags have the structure (N)ₙ(X)ₓ(M)ₘ(Y)_{y}, wherein “N” represents a random tag sequence that is generated from A, G, C, T, U or I, and wherein “n” is 2-10 which represents the nucleotide length of the “N” random tag sequence; wherein “X” represents a fixed tag sequence, and wherein “x” is 2-10 which represents the nucleotide length of the “X” random tag sequence; wherein “M” represents a random tag sequence that is generated from A, G, C, T, U or I, wherein the random tag sequence “M” differs or is the same as the random tag sequence “N”, and wherein “m” is 2-10 which represents the nucleotide length of the “M” random tag sequence; and wherein “Y” represents a fixed tag sequence, wherein the fixed tag sequence of “Y” is the same or differs from the fixed tag sequence of “X”, and wherein “y” is 2-10 which represents the nucleotide length of the “Y” random tag sequence. In some embodiments, the fixed tag sequence “X” is the same in a plurality of tags. In some embodiments, the fixed tag sequence “X” is different in a plurality of tags. In some embodiments, the fixed tag sequence “Y” is the same in a plurality of tags. In some embodiments, the fixed tag sequence “Y” is different in a plurality of tags. In some embodiments, the fixed tag sequences “(X)ₓ” and “(Y)y” within the plurality of amplicons are sequence alignment anchors.

[0111] In some embodiments, the random sequence within a unique tag sequence is represented by “N”, and the fixed sequence is represented by “X”. Thus, a unique tag sequence is represented by N₁N₂N₃X₁X₂X₃ or by N₁N₂N₃X₁X₂X₃N₄N₅N₆X₄X₅X₆. Optionally, a unique tag sequence can have a random sequence in which some or all of the nucleotide positions are randomly selected from a group consisting of A, G, C, T, U and I. For example, a nucleotide for each position within a random sequence is independently selected from any one of A, G, C, T, U or I, or is selected from a subset of these six different types of nucleotides.

[0112] Optionally, a nucleotide for each position within a random sequence is independently selected from any one of A, G, C or T. In some embodiments, the first fixed tag sequence “X₁X₂X₃” is the same or different sequence in a plurality of tags. In some embodiments, the second fixed tag sequence “X₄X₅X₆” is the same or different sequence in a plurality of tags. In some embodiments, the first fixed tag sequence “X₁X₂X₃” and the second fixed tag sequence “X₄X₅X₆” within the plurality of amplicons are sequence alignment anchors.

[0113] In some embodiments, a unique tag sequence comprises the sequence 5′-NNNACTNNNTGA-3′, where “N” represents a position within the random sequence that is generated randomly from A, G, C or T, the number of possible distinct random tags is calculated to be 4⁶ (or 4∧6) is about 4096, and the number of possible different combinations of two unique tags is 4¹² (or 4∧12) is about 16.78 million. In some embodiments, the underlined portions of 5′-NNNACTNNNTGA-3′ are a sequence alignment anchor.

[0114] In some embodiments, the fixed sequences within the unique tag sequence is a sequence alignment anchor that can be used to generate error-corrected sequencing data. In some embodiments fixed sequences within the unique tag sequence is a sequence alignment anchor that can be used to generate a family of error-corrected sequencing reads.

### Kits, Systems

[0115] Further provided herein are kits for use in preparing libraries of target nucleic acids using methods of the first or second aspects of the invention. Embodiments of a kit comprise a supply of at least a pair of target specific adaptors as defined herein which are capable of producing a first amplification product; as well as optionally a supply of at least one universal pair of amplification primers capable of annealing to the universal handle(s) of the adaptor and priming synthesis of an amplification product, which amplification product would include a target sequence of interest ligated to a universal sequence. Adaptors and/or primers may be supplied in kits ready for use, or more preferably as concentrates requiring dilution before use, or even in a lyophilized or dried form requiring reconstitution prior to use. In certain embodiments kits further include a supply of a suitable diluent for dilution or reconstitution of the components. Optionally, kits further comprise supplies of reagents, buffers, enzymes, dNTPs, etc., for use in carrying out amplification, digestion, repair, and/or purification in the generation of library as provided herein. Non-limiting examples of such reagents are as described in the Materials and Methods sections of the accompanying Exemplification. Further components which optionally are supplied in the kit include components suitable for purification of libraries prepared using the provided methods. In some embodiments, provided is a kit for generating a target-specific library comprising a plurality of target-specific adaptors having a 5′ universal handle sequence, a 3′ target specific sequence and a cleavable group, a DNA polymerase, an adaptor, dATP, dCTP, dGTP, dTTP, and a digestion reagent. In some embodiments, the kit further comprises one or more antibodies, a repair reagent, universal primers optionally comprising nucleic acid barcodes, purification solutions or columns.

[0116] Particular features of adaptors for inclusion in kits are as described elsewhere herein in relation to other aspects of the invention. The structure and properties of universal amplification primers are well known to those skilled in the art and can be implemented for utilization in conjunction with provided methods and compositions to adapt to specific analysis platforms (e.g., as described herein universal P1 and A primers have been described in the art and utilized for sequencing on Ion Torrent sequencing platforms). Similarly, additional and other universal adaptor/primer sequences described and known in the art (e.g., Illumina universal adaptor/primer sequences, PacBio universal adaptor/primer sequences, etc.) can be used in conjunction with the methods and compositions provided herein. Suitable primers of appropriate nucleotide sequence for use with adaptors included in the kit are readily prepared using standard automated nucleic acid synthesis equipment and reagents in routine use in the art. A kit may include a supply of one single type of universal primer or separate types (or even a mixture) of two different universal primers, for example a pair of amplification primers suitable for amplification of templates modified with adaptors in a first amplification. A kit may comprise at least a pair of adaptors for first amplification of a sample of interest according to the methods of the invention, plus at least two different amplification primers that optionally carry a different tag (barcode) sequence, where the tag (barcode) sequence does not hybridize to the adaptor. A kit can be used to amplify at least two different samples where each sample is amplified according to methods of the invention separately and a second amplification comprises using a single universal primer having a barcode, and then pooling prepared sample libraries after library preparations. In some embodiments a kit includes different universal primer-pairs for use in second amplification step described herein. In this context the ‘universal’ primer-pairs may be of substantially identical nucleotide sequence but differ with respect to some other feature or modification.

[0117] Further provided are systems, e.g., systems used to practice methods provided herein, and/or comprising compositions provided herein. In some embodiments, systems facilitate methods carried out in automated mode. In certain embodiments, systems facilitate high throughput mode. In certain embodiments, systems include, e.g., a fluid handling element, a fluid containing element, a heat source and/or heat sink for achieving and maintaining a desired reaction temperature, and/or a robotic element capable of moving components of the system from place to place as needed (e.g., a multiwell plate handling element).

### Samples

[0118] As defined herein, “sample” and its derivatives, is used in its broadest sense and includes any specimen, culture and/or the like that is suspected of including a target nucleic acid. In some embodiments, a sample comprises DNA, RNA, TNA, chimeric nucleic acid, hybrid nucleic acid, multiplex-forms of nucleic acids or any combination of two or more of the foregoing. In some embodiments a sample useful in conjunction with methods of the invention includes any biological, clinical, surgical, agricultural, atmospheric or aquatic-based specimen containing one or more target nucleic acid of interest. In some embodiments, a sample includes nucleic acid molecules obtained from an animal such as a human or mammalian source. In another embodiment, a sample includes nucleic acid molecules obtained from a non-mammalian source such as a plant, bacteria, virus or fungus. In some embodiments, the source of the nucleic acid molecules may be an archived or extinct sample or species. In some embodiments a sample includes isolated nucleic acid sample prepared, for example, from a source such as genomic DNA, RNA TNA or a prepared sample such as, e.g., fresh-frozen or formalin-fixed paraffin-embedded (FFPE) nucleic acid specimen. It is also envisioned that a sample is from a single individual, a collection of nucleic acid samples from genetically related members, multiple nucleic acid samples from genetically unrelated members, multiple nucleic acid samples (matched) from a single individual such as a tumor sample and normal tissue sample, or genetic material from a single source that contains two distinct forms of genetic material such as maternal and fetal DNA obtained from a maternal subject, or the presence of contaminating bacteria DNA in a sample that contains plant or animal DNA. In some embodiments, a source of nucleic acid material includes nucleic acids obtained from a newborn (e.g., a blood sample for newborn screening). In some embodiments, provided methods comprise amplification of multiple target-specific sequences from a single nucleic acid sample. In some embodiments, provided methods comprise target-specific amplification of two or more target sequences from two or more nucleic acid samples or species. In certain embodiments, provided methods comprise amplification of highly multiplexed target nucleic acid sequences from a single sample. In particular embodiments, provided methods comprise amplification of highly multiplexed target nucleic acid sequences from more than one sample, each from the same source organism.

[0119] In some embodiments a sample comprises a mixture of target nucleic acids and non-target nucleic acids. In certain embodiments a sample comprises a plurality of initial polynucleotides which comprises a mixture of one or more target nucleic acids and may include one or more non-target nucleic acids. In some embodiments a sample comprising a plurality of polynucleotides comprises a portion or aliquot of an originating sample; in some embodiments, a sample comprises a plurality of polynucleotides which is the entire originating sample. In some embodiments a sample comprises a plurality of initial polynucleotides is isolated from the same source or from the same subject at different time points.

[0120] In some embodiments, a nucleic acid sample includes cell-free nucleic acids from a biological fluid, nucleic acids from a tissue, nucleic acids from a biopsied tissue, nucleic acids from a needle biopsy, nucleic acids from a single cell or nucleic acids from two or more cells. In certain embodiments, a single reaction mixture contains 1-100 ng of the plurality of initial polynucleotides. In some embodiments a plurality of initial polynucleotides comprises a formalin fixed paraffin-embedded (FFPE) sample; genomic DNA; RNA; TNA; cell free DNA or RNA or TNA; circulating tumor DNA or RNA or TNA; fresh frozen sample, or a mixture of two or more of the foregoing; and in some embodiments a the plurality of initial polynucleotides comprises a nucleic acid reference standard. In some embodiments, a sample includes nucleic acid molecules obtained from biopsies, tumors, scrapings, swabs, blood, mucus, urine, plasma, semen, hair, laser capture micro-dissections, surgical resections, and other clinical or laboratory obtained sample. In some embodiments, a sample is an epidemiological, agricultural, forensic or pathogenic sample. In certain embodiments, a sample includes a reference. In some embodiments a sample is a normal tissue or well documented tumor sample. In certain embodiments a reference is a standard nucleic acid sequence (e.g., Hg19).

### Target Nucleic Acid Sequence Analysis

[0121] Provided methods and compositions of the invention are particularly suitable for amplifying, optionally tagging, and preparing target sequences for subsequent analysis. Thus, in some embodiments, methods provided herein include analyzing resulting library preparations. For example, methods comprise analysis of a polynucleotide sequence of a target nucleic acid, and, where applicable, analysis of any tag sequence(s) added to a target nucleic acid. In some embodiments wherein multiple target nucleic acid regions are amplified, provided methods include determining polynucleotide sequences of multiple target nucleic acids. Provided methods further optionally include using a second tag sequence(s), e.g., barcode sequence, to identify the source of the target sequence (or to provide other information about the sample source). In certain embodiments, use of prepared library composition is provided for analysis of the sequences of the nucleic acid library.

[0122] In particular embodiments, use of prepared tagged library compositions is provided for further analyzing the sequences of the target nucleic acid library. In some embodiments determination of sequences comprises determining the abundance of at least one of the target sequences in the sample. In some embodiments determination of a low frequency allele in a sample is comprised in determination of sequences of a nucleic acid library. In certain embodiments, determination of the presence of a mutant target nucleic acid in the plurality of polynucleotides is comprised in determination of sequences of a nucleic acid library. In some embodiments, determination of the presence of a mutant target nucleic acid comprises detecting the abundance level of at least one mutant target nucleic acid in the plurality of polynucleotides. For example, such determination comprises detecting at least one mutant target nucleic acid is present at 0.05% to 1% of the original plurality of polynucleotides in the sample, detecting at least one mutant target nucleic acid is present at about 1% to about 5% of the polynucleotides in the sample, and/or detecting at least 85%-100% of target nucleic acids in sample. In some embodiments, determination of the presence of a mutant target nucleic acid comprises detecting and identification of copy number variation and/or genetic fusion sequences in a sample.

[0123] In some embodiments, nucleic acid sequencing of the amplified target sequences produced by the teachings of this disclosure include de novo sequencing or targeted re-sequencing. In some embodiments, nucleic acid sequencing further includes comparing the nucleic acid sequencing results of the amplified target sequences against a reference nucleic acid sequence. In some embodiments, nucleic acid sequencing of the target library sequences further includes determining the presence or absence of a mutation within a nucleic acid sequence. In some embodiments, nucleic acid sequencing includes the identification of genetic markers associated with disease (e.g., cancer and/or inherited disease).

[0124] In some embodiments, prepared library of target sequences of the disclosed methods is used in various downstream analysis or assays with, or without, further purification or manipulation. In some embodiments analysis comprises sequencing by traditional sequencing reactions, high throughput next generation sequencing, targeted multiplex array sequence detection, or any combination of two or more of the foregoing. In certain embodiments analysis is carried out by high throughput next generation sequencing. In particular embodiments sequencing is carried out in a bidirectional manner, thereby generating sequence reads in both forward and reverse strands for any given amplicon.

[0125] In some embodiments, library prepared according to the methods provided herein is then further manipulated for additional analysis. For example, prepared library sequences is used in downstream enrichment techniques known in the art, such a bridge amplification or emPCR to generate a template library that is then used in next generation sequencing. In some embodiments, the target nucleic acid library is used in an enrichment application and a sequencing application. For example, sequence determination of a provided target nucleic acid library is accomplished using any suitable DNA sequencing platform. In some embodiments, the library sequences of the disclosed methods or subsequently prepared template libraries is used for single nucleotide polymorphism (SNP) analysis, genotyping or epigenetic analysis, copy number variation analysis, gene expression analysis, analysis of gene mutations including but not limited to detection, prognosis and/or diagnosis, detection and analysis of rare or low frequency allele mutations, nucleic acid sequencing including but not limited to de novo sequencing, targeted resequencing and synthetic assembly analysis. In one embodiment, prepared library sequences are used to detect mutations at less than 5% allele frequency. In some embodiments, the methods disclosed herein is used to detect mutations in a population of nucleic acids at less than 4%, 3%, 2% or at about 1% allele frequency. In another embodiment, libraries prepared as described herein are sequenced to detect and/or identify germline or somatic mutations from a population of nucleic acid molecules. In certain embodiments, sequencing adaptors are ligated to the ends of the prepared libraries generate a plurality of libraries suitable for nucleic acid sequencing.

[0126] In some embodiments, methods for preparing a target-specific amplicon library are provided for use in a variety of downstream processes or assays such as nucleic acid sequencing or clonal amplification. In some embodiments, the library is amplified using bridge amplification or emPCR to generate a plurality of clonal templates suitable for nucleic acid sequencing. For example, optionally following target-specific amplification a secondary and/or tertiary amplification process including, but not limited to, a library amplification step and/or a clonal amplification step is performed. “Clonal amplification” refers to the generation of many copies of an individual molecule. Various methods known in the art is used for clonal amplification. For example, emulsion PCR is one method, and involves isolating individual DNA molecules along with primer-coated beads in aqueous bubbles within an oil phase. A polymerase chain reaction (PCR) then coats each bead with clonal copies of the isolated library molecule and these beads are subsequently immobilized for later sequencing. Emulsion PCR is used in the methods published by Marguilis et al. and Shendure and Porreca et al. (also known as “polony sequencing,” commercialized by Agencourt and recently acquired by Applied Biosystems). Margulies, et al. (2005) Nature 437: 376-380; Shendure et al., Science 309 (5741): 1728-1732. Another method for clonal amplification is “bridge PCR,” where fragments are amplified upon primers attached to a solid surface. These methods, as well as other methods of clonal amplification, both produce many physically isolated locations that each contain many copies derived from a single molecule polynucleotide fragment. Thus, in some embodiments, the one or more target specific amplicons are amplified using for example, bridge amplification or emPCR to generate a plurality of clonal templates suitable for nucleic acid sequencing.

[0127] In some embodiments, at least one of the library sequences to be clonally amplified are attached to a support or particle. A support can be comprised of any suitable material and have any suitable shape, including, for example, planar, spheroid or particulate. In some embodiments, the support is a scaffolded polymer particle as described in U.S. Published App. No. 20100304982, hereby incorporated by reference in its entirety. In certain embodiments methods comprise depositing at least a portion of an enriched population of library sequences onto a support (e.g., a sequencing support), wherein the support comprises an array of sequencing reaction sites. In some embodiments, an enriched population of library sequences are attached to the sequencing reaction sites on the support wherein the support comprises an array of 10² to 10¹⁰ sequencing reaction sites.

[0128] Sequence determination means determination of information relating to the sequence of a nucleic acid and may include identification or determination of partial as well as full sequence information of the nucleic acid. Sequence information may be determined with varying degrees of statistical reliability or confidence. In some embodiments sequence analysis includes high throughput, low depth detection such as by qPCR, rtPCR, and/or array hybridization detection methodologies known in the art. In some embodiments, sequencing analysis includes the determination of the in depth sequence assessment, such as by Sanger sequencing or other high throughput next generation sequencing methods. Next-generation sequencing means sequence determination using methods that determine many (typically thousands to billions) nucleic acid sequences in an intrinsically massively parallel manner, e.g. where many sequences are read out, e.g., in parallel, or alternatively using an ultra-high throughput serial process that itself may be parallelized. Thus, in certain embodiments, methods of the invention include sequencing analysis comprising massively parallel sequencing. Such methods include but are not limited to pyrosequencing (for example, as commercialized by 454 Life Sciences, Inc., Branford, Conn.); sequencing by ligation (for example, as commercialized in the SOLiD™. technology, Life Technologies, Inc., Carlsbad, Calif); sequencing by synthesis using modified nucleotides (such as commercialized in TruSeq™ and HiSeq™ and MiSeq™ and/or NovaSeq™ technology by Illumina, Inc., San Diego, Calif.; HeliScope™ by Helicos Biosciences Corporation, Cambridge, Mass.; and PacBio Sequel® or RS systems by Pacific Biosciences of California, Inc., Menlo Park, Calif), sequencing by ion detection technologies (e.g., Ion Torrent™ technology, Life Technologies, Carlsbad, Calif.); sequencing of DNA nanoballs (Complete Genomics, Inc., Mountain View, Calif); nanopore-based sequencing technologies (for example, as developed by Oxford Nanopore Technologies, LTD, Oxford, UK), and like highly parallelized sequencing methods.

[0129] For example, in certain embodiments, libraries produced by the teachings of the present disclosure are sufficient in yield to be used in a variety of downstream applications including the Ion Xpress™ Template Kit using an Ion Torrent™ PGM system (e.g., PCR-mediated addition of the nucleic acid fragment library onto Ion Sphere™ Particles)(Life Technologies, Part No. 4467389) or Ion Torrent Proton™ system). For example, instructions to prepare a template library from the amplicon library can be found in the Ion Xpress Template Kit User Guide (Life Technologies, Part No. 4465884), hereby incorporated by reference in its entirety. Instructions for loading the subsequent template library onto the Ion Torrent™ Chip for nucleic acid sequencing are described in the Ion Sequencing User Guide (Part No. 4467391), hereby incorporated by reference in its entirety.

[0130] The initiation point for the sequencing reaction may be provided by annealing a sequencing primer to a product of a solid-phase amplification reaction. In this regard, one or both of the adaptors added during formation of template library may include a nucleotide sequence which permits annealing of a sequencing primer to amplified products derived by whole genome or solid-phase amplification of the template library. Depending on implementation of an embodiment of the invention, a tag sequence and/or target nucleic acid sequence may be determined in a single read from a single sequencing primer, or in multiple reads from two different sequencing primers. In the case of two reads from two sequencing primers, a ‘tag read’ and a ‘target sequence read’ are performed in either order, with a suitable denaturing step to remove an annealed primer after the first sequencing read is completed.

[0131] In some embodiments, a sequencer is coupled to server that applies parameters or software to determine the sequence of the amplified target nucleic acid molecules. In certain embodiments, the sequencer is coupled to a server that applies parameters or software to determine the presence of a low frequency mutation allele present in a sample.

### EXEMPLIFICATION

### Example 1 Materials and Methods

[0132] Reverse Transcription (RT) Reaction method (21 uL reaction) may be carried out in samples where RNA and DNA are analyzed, e.g., FFPE RNA and cfTNA:
[0133] 1. Thaw the 5× URT buffer at room temperature for at least 5 minutes. (NOTE: Check for white precipitate in the tube. Vortex to mix as needed)

| URT Buffer | 5× concentration | |
|---|---|---|
| TrisHCl ph 8.4 | 125 | mM |
| Ammonium sulfate | 50 | mM |
| MgCl2 | 20 | mM |
| dNTP pH 7.6 | 5 | mM |

[0134] 2. In a MicroAmp EnduraPlate 96-well plate, set up the RT reaction by adding the following components.
[0135] (5-15 ng RNA or DNA//5-40 ng cfTNA)

| Component | Volume | |
|---|---|---|
| 20 ng input cfTNA/10 ng FFPE RNA | 15 | μL |
| 5× URT buffer | 4 | μL |
| 10× RT (SSIV) Enzyme Mix | 2 | μL |
| Total volume | 21 | L |

[0136] 3.Mix entire contents by vortexing or pipetting. Spin down briefly.
[0137] 4.Add 20 μl Parol 40C oil to the top of each reaction mix.
[0138] 5.Load the plate into thermocycler (e.g., SimpliAmp Thermocycler), and run the following program:

| Stage | Temperature | Time |
|---|---|---|
| Stage 1 | 25° C. | 10 min |
| Stage 2 | 50° C. | 10 min |
| Stage 3 | 85° C. | 5 min |
| Hold | 4° C. | ∞ |

### Low-Cycle Tagging PCR (38 uL Reaction Volume+20 uL Oil):

[0139] Assemble tagging PCR reaction in 96-well PCR plate wells:

### FFPE DNA Samples Only

[0140] 1. Assemble the reaction by adding the following components to a MicroAmp EnduraPlate 96-well plate:
   [0141] a. Prepare UDG mix: 1 ul+5 ul 5xURT buffer
   [0142] b. Add the 6 ul diluted UDG to 15 μl FFPE DNA samples.
   [0143] c. Mix by vortexing. Briefly spin down to collect reaction at the bottom of the wells.
   [0144] d. Add 20 μL Parol 40C Oil to the top of each sample.
   [0145] e. Perform the reaction as following:

| Stage | Temperature | Time | |
|---|---|---|---|
| Stage 1 | 37° C. | 2 | min |
| Stage 2 | 50° C. | 10 | min |
| Hold | 4° C. | >=1 | min |

[0146] 2.Prepare Amplification Master Mix:

| Component | Volume | |
|---|---|---|
| Panel FWD pool (125 nM) | 3.75 | μL |
| Panel REV pool (125 nM) | 3.75 | μL |
| 4× SuperFiU MM v2.0 | 9.5 | μL |
| Total volume | 17 | μL |

[0147] 3.Add 17 μL PCR Master Mix to 21 μL UDG treated FFPE DNA samples.

[0148] Set a pipette at 20 μL volume. Mix the reaction below oil by pipetting up and down 20 times to ensure thorough mix of the reaction without disturbing the oil phase. Spin down the plate briefly.

FFPE RNA and cfTNA Samples Only
[0149] 1.Add components directly to the RT reactions from RT steps above:

| Component | Volume | |
|---|---|---|
| RT reaction | 21 | μL |
| Panel FWD pool (10×, 125 nM) | 3.8 | μL |
| Panel REV pool (10×, 125 nM) | 3.8 | μL |
| 4× SuperFiU MM v2.0 | 9.5 | μL |
| Total volume | 38 | L |

[0150] 2.Set a pipette at 20 μL volume. Mix the reaction below oil by pipetting up and down 20 times to ensure thorough mix of the reaction without disturbing the oil phase. Spin down the plate briefly.
[0151] 3.Perform 3-cycles tagging PCR using the following cycling condition on SimpliAmp:

### For FFPE DNA and RNA Libraries:

| Stage | Temperature | Time | |
|---|---|---|---|
| Hold | 99° C. | 1 | min |
| Cycle: 3 | 99° C. | 30 | sec |
| | 64° C. | 2 | min |
| | 60° C. | 12 | min |
| | 66° C. | 2 | min |
| | 72° C. | 2 | min |
| Hold | 72° C. | 2 | min |

| | | |
|---|---|---|
| Hold | 4° C. | ∞ |

For cfTNA Libraries,

| Stage | Temperature | Time | |
|---|---|---|---|
| Cycle: 3 | 99° C. | 30 | sec |
| | 64° C. | 2 | min |
| | 60° C. | 12 | min |
| | 66° C. | 2 | min |
| | 72° C. | 2 | min |
| Hold | 72° C. | 2 | min |

| | | |
|---|---|---|
| Hold | 4° C. | ∞ |

### Digestion-Filling-Ligation (45.6 μL Reaction Volume+20 μL Oil):

[0152] 1. Add 7.6 μL of SUPA into each of the above PCR reaction well. Add SUPA directly to the sample below the oil layer.
[0153] 2. Set a pipette at 25 μL. Mix the reaction below oil layer by pipetting up and down for 20 times. Spin down the plate briefly.
[0154] 3. Load the plate into thermocycler and run the following program:

| Stage | Temperature | Time |
|---|---|---|
| Stage 1 | 30° C. | 15 min |
| Stage 2 | 50° C. | 15 min |
| Stage 3 | 55° C. | 15 min |
| Stage 4 | 25° C. | 10 min |
| Stage 5 | 98° C. | 2 min |
| Hold | 4° C. | ∞ |

### Library Amplification (˜51 μL Reaction Volume+20 μL Oil)

[0155] 1.Carefully transfer 30 μL the above post digestion-filling-ligation reaction to AmpliSeq HD Dual Barcodes.

[0156] Mix well by pipetting up and down 20 times. Transfer all the reactions back to the original well under the oil layer.
[0157] 2.Set a pipette at 30 μL. Mix entire reaction below oil by pipetting up and down 20 times. Spin down the plate briefly.
[0158] 3.Load the plate into thermocycler and run the following program:

| Stage | Temperature | Time |
|---|---|---|
| Hold | 99° C. | 15 sec |
| Cycle: 5 | 99° C. | 15 sec |
| | 62° C. | 20 sec |
| | 72° C. | 20 sec |
| Cycle: 15 (FFPE DNA | 99° C. | 15 sec |
| and cfTNA) | | |
| Cycle: 18 (FFPE RNA) | 70° C. | 40 sec |
| Hold | 72° C. | 5 min |
| Hold | 4° C. | ∞ |

### 2-Round AmpureXP Library Purification

[0159] Resulting repaired sample is purified using 36.8 ul Ampure® beads (Beckman Coulter, Inc.) according to the manufacturer instructions for two rounds. Briefly:
[0160] Transfer 46 μL of library reaction below oil layer to new, clean wells on the PCR plate.
[0161] Add 36.8 μl of Agencourt™ AMPure™ XP Reagent to each sample and mix by pipetting then incubate at room temperature for 5 minutes.
[0162] Place the plate on magnet until the solutions in wells become clear.
[0163] Carefully remove the supernatant; then remove residual supernatant.
[0164] Add 150 μL of 80% ethanol in 10 mM pH 8 Tris-HCl. Do not disturb the bead pellet.
[0165] Toggle plate on magnet 3 times with 5 seconds interval; Remove the supernatant; Repeat wash steps one
[0166] more time. Use a pipette to remove residual buffer in the wells.
[0167] Dry wells at room temperature for 5 min.
[0168] Add 30 μL of low TE buffer to the wells and pipette to resuspend beads.
[0169] Incubate the solution at room temperature for 5 min, Place plate on magnet to clear solution.
[0170] Transfer 30 μL of the eluent into clean well on a plate.
[0171] Add into the above well 30 μL (1× Volume) of AmpureXP beads; Pipette in well to mix.
[0172] Repeat steps as above, using 40 μL of low TE buffer to elute after second purification.
[0173] Transfer 40 μL of the library into a new clean well.
   Library Normalization with Individual Equalizer

[0174] First, warm all reagents in the Ion Library Equalizer™ Kit to room temperature. Vortex and centrifuge all reagents. Wash the Equalizer™ Beads (if previously performed skip to Add Equalizer™ Beads and Wash).
[0175] 1. For each 4 reaction, add 12 L of beads into a clean 1.5-mL tube and 24 L/reaction Equalizer™ Wash Buffer.
[0176] 2. Place tube in a magnetic rack for 3 minutes or until the solution is completely clear.
[0177] 3. Carefully remove and discard the supernatant without disturbing the pellet.
[0178] 4. Remove from magnet, add 24 L per reaction Equalizer™ Wash Buffer, and resuspend.

### Amplify the Library

[0179] 5. Remove plate with purified libraries from the magnet, then add 10 μL of 5X DV-Amp Mix and 2 μL of Equalizer™ Primers (pink cap in Equalizer kit). Total volume=52 μL
[0180] 6. Mix.
[0181] 7. Add 20 μL Parol 40C Oil gently on top of samples.
[0182] 8. run the following program on thermocycler:
   [0183] 98C for 2 min
   [0184] 9-cycles amplification for FFPE DNA/RNA OR 6-cycles amplification for cfTNA:
   [0185] 98C for 15 sec
   [0186] 64C for 1 min
   [0187] Then
   [0188] Hold at 4C for infinite
[0189] 9. (Optional) after thermal cycling, centrifuge plate to collect any droplets.

### Add Equalizer™ Capture to the Amplified Library

[0190] 10. Add 10 μL of Equalizer Capture to each library amplification reaction beneath the oil layer.
[0191] 11. mix up and down 10×.
[0192] 12. Incubate at room temperature for 5 minutes.

### Add Equalizer™ Beads and Wash

[0193] 13. Transfer 60 μL amplified library samples beneath the oil layer into well with washed beads.
[0194] 14. mix thoroughly.
[0195] 15. Incubate at room temperature for 5 minutes.
[0196] 16. Place plate in magnet, then incubate for 2 minutes or until the solution is clear.
[0197] 17. remove the supernatant.
[0198] 18. Add 150 μL of Equalizer™ Wash Buffer to each reaction.
[0199] 19. With the plate still in the magnet, remove, and discard supernatant.
[0200] 20. Repeat the bead wash Elute the Equalized Library.

### Elute the Equalized Library

[0201] 21. Remove plate from magnet, add 100 μL of Equalizer™ Elution Buffer to each pellet.
[0202] 22. Pipette mix with 50 ul volume 5×.
[0203] 23. Elute library by incubating on thermo cycler at 32° C. for 5 minutes.
[0204] 24. Remove immediately, place plate in magnet, as soon as solution is clear, move to new wells.
[0205] 25. Perform qPCR and adjust pool @100 pM for templating and sequencing.

### Example 2 Compositions and Methods

[0206] The first step of provided methods comprises a few rounds of amplification, for example, three to six cycles of amplification, and in certain instances, three cycles of amplification using forward and reverse adaptors to each gene specific target sequence. Each adaptor contains a 5′ universal sequence, and a 3′ gene specific target sequence. In some embodiments adaptors optionally comprise a unique tag sequence located between the 5′ universal and the 3′ gene specific target sequences.

[0207] In specific embodiments wherein unique tag sequences are utilized, each gene specific target adaptor pair includes a multitude of different unique tag sequences in each adaptor. For example, each gene specific target adaptor comprises up to 4096 TAGs. Thus, each target specific adaptor pair comprises at least four and up to 16,777,216 possible combinations.

[0208] Each of the provided adaptors comprises a cleavable uracil in place of thymine at specific locations in the forward and reverse adaptor sequences. Positions of uracils (Us) are consistent for all forward and reverse adaptors having unique tag sequences, wherein uracils (Us) are present flanking the 5′ and 3′ ends of the unique tag sequence when present; and Us are present in each of the gene specific target sequence regions, though locations for each gene specific target sequence will inevitably vary. Uracils flanking each unique tag sequence (UT) and in gene-specific sequence regions are designed in conjunction with sequences and calculated Tm of such sequences, to promote fragment dissociation at a temperature lower than melting temperature of the universal handle sequences, which are designed to remain hybridized at a selected temperature. Variations in Us in the flanking sequences of the UT region are possible, however designs keep the melting temperature below that of the universal handle sequences on each of the forward and reverse adaptors. Exemplary adaptor sequence structures comprise: Forward Adaptor:

SEQ ID NO: 1564
------A Handle----- ------*UT*------ --Gene Specific--
TCTGTACGGTGACAAGGCG-U-NNNACTNNNTGA-U-XXXXXXXXXXXXXXXX
Reverse Adaptor
SEQ ID NO: 1565
TGACAAGGCGTAGTCACGG-U-NNNACTNNNTGA-U-XXXXXXXXXXXXXXXX
-----B Handle------- ------UT------- -------Gene Specific--------

Wherein each N is a base selected from A, C, G, or T and the constant sections of the UT region are used as anchor sequences to ensure correct identification of variable (N) portion. The constant and variable regions of the UT can be significantly modified (e.g., alternative constant sequence, >3 Ns per section) as long as the Tm of the UT region remains below that of the universal handle regions. Importantly, cleavable uracils are absent from each forward (e.g., TCTGTACGGTGACAAGGCG (SEQ ID NO:1566 and reverse (e.g., TGACAAGGCGTAGTCACGG (SEQ ID NO: 1567) universal handle sequence. In the present example, universal sequences have been designed to accommodate follow on amplification and addition of sequencing sequences on the ION Torrent platform, however, one skilled in the art would understand that such universal sequences could be adaptable to use other universal sequences which may be more amenable to alternative sequencing platforms (e.g., ILLUMINA sequencing systems, QIAGEN sequencing systems, PACBIO sequencing systems, BGI sequencing systems, or others).

[0209] Methods of use of provided compositions comprise library preparation via AmpliSeq HD technology with slight variations thereof and using reagents and kits available from Thermo Fisher Scientific. SuperFiU DNA comprises a modification in the uracil-binding pocket (e.g., AA 36) and a family B polymerase catalytic domain (e.g., AA 762). SuperFiU is described in US Patent Publication No US2021/0147817 filed Jun. 26, 2017, which is hereby incorporated by reference. Polymerase enzymes may be limited in their ability to utilize uracil and/or any alternative cleavable residues (e.g., inosine, etc.) included into adaptor sequences. In certain embodiments, it may also be advantageous to use a mixture of polymerases to reduce enzyme specific PCR errors.

[0210] The second step of methods involves partial digestion of resulting amplicons, as well as any unused uracil-containing adaptors. For example, where uracil is incorporated as a cleavable site, digestion and repair includes enzymatic cleavage of the uridine monophosphate from resulting primers, primer dimers and amplicons, and melting DNA fragments, then repairing gapped amplicons by polymerase fill-in and ligation. This step reduces and potentially eliminates primer-dimer products that occur in multiplex PCR. In some instances, digestion and repair are carried out in a single step. In certain instances, it may be desirable to separate digestion and repair- steps temporally. For example, thermolabile polymerase inhibitors may be utilized in conjunction with methods, such that digestion occurs at lower temperatures (25-40° C.), then repair is activated by increasing temperature enough to disrupt a polymerase-inhibitor interaction (e.g., polymerase-Ab), though not high enough to melt the universal handle sequences.

[0211] Uracil-DNA Glycosylase (UDG) enzyme can be used to remove uracils, leaving abasic sites which can be acted upon by several enzymes or enzyme combinations including (but not limited to): APE 1-Apurinic/apyrimidinic endonuclease; FPG-Formamidopyrimidine [fapy]-DNA glycosylase; Nth-Endonuclease III; Endo VIII-Endonuclease VIII; PNK-Polynucleotide Kinase; Taq- Thermus aquaticus DNA polymerase; DNA pol I-DNA polymerase I; Pol beta-Human DNA polymerase beta. In a particular implementation, the method uses Human apurinic/apyrimidinic endonuclease, APE1. APE1 activity leaves a 3′-OH and a 5′deoxyribose-phosphate (5′-dRP). Removal of the 5′-dRP can be accomplished by a number of enzymes including recJ, Polymerase beta, Taq, DNA pol I, or any DNA polymerase with 5′-3′ exonuclease activity. Removal of the 5′-dRP by any of these enzymes creates a ligatable 5′-phosphate end. In another implementations, UDG activity removes the Uracil and leaves and abasic site which is removed by FPG, leaving a 3′ and 5′-phosphate. The 3′-phosphate is then removed by T4 PNK, leaving a polymerase extendable 3′-OH. The 5′-deoxyribose phosphate can then be removed by Polymerase beta, fpg, Nth, Endo VIII, Taq, DNA pol I, or any other DNA polymerase with 5′-3′ exonuclease activity. In a particular implementation Taq DNA polymerase is utilized.

[0212] Repair fill-in process can be accomplished by almost any polymerase, possibly the amplification polymerase used for amplification in step 1 or by any polymerase added in step 2 including (but not limited to): Phusion DNA polymerase; Phusion U DNA polymerase; SuperFi DNA polymerase; SuperFi U DNA polymerase; TAQ; Pol beta; T4 DNA polymerase; and T7 DNA polymerase. Ligation repair of amplicons can be performed by many ligases including (but not limited to): T4 DNA ligase; T7 DNA ligase; Taq DNA ligase. In a particular implementation of the methods, Taq DNA polymerase is utilized and ligation repaired in accomplished by T7 DNA ligase.

[0213] A last step of library preparation involves amplification of the repaired amplicons by standard PCR protocols using universal primers that contain sequences complementary to the universal handle sequences on the 5′ and 3′ ends of prepared amplicons. For example, an A-universal primer, and a P1 universal primer, each part of the Ion Express Adaptor Kit (Thermo Fisher Scientific, Inc.) may optionally contain a sample specific barcode. The last library amplification step may be performed by many polymerases including, but not limited to: Phusion DNA polymerase; Phusion U DNA polymerase; SuperFi DNA polymerase; SuperFi U DNA polymerase; Taq DNA polymerase; Veraseq Ultra DNA polymerase.

### Example 3 Assay Content and Methods

[0214] With primers directed to target sequences specific to targets in Table 1, adaptors each comprise 4096 unique tag sequences for each gene specific target sequence, resulting in an estimate of 16,777,216 different unique tag combinations for each gene specific target sequence pair.

Preparation of library was carried out according to the method described above. Prepared libraries are prepared for templating and sequenced, and analyzed. Sequencing can be carried out by a variety of known methods, including, but not limited to sequencing by synthesis, sequencing by ligation, and/or sequencing by hybridization. Sequencing has been carried out in the examples herein using the Ion Torrent platform (Thermo Fisher Scientific, Inc.), however, libraries can be prepared and adapted for analysis, e.g., sequencing, using any other platforms, e.g., Illumina, Qiagen, PacBio, etc. Results may be analyzed using a number of metrics to assess performance, for example:
[0215] # of families (with ng input DNA captured) The median # of families is a measure of the number of families that maps to an individual target. In this case, each unique molecular tag is a family.
[0216] Uniformity is a measure of the percentage of target bases covered by at least 0.2× the average read depth. This metric is used to ensure that the technology does not selectively under-amplify certain targets.
[0217] Positives/Negatives: When a control sample with known mutations is utilized is analyzed (e.g., Acrometrix Oncology Hotspot Control DNA, Thermo Fisher Scientific, Inc.), the number of True Positives can be tracked.
   [0218] True Positives: The number of True Positives informs on the number of mutations that were present and correctly identified.
   [0219] False positives(FP): (Hot spot and Whole Target) The number of False Positives informs on the number of mutations that are determined to be present, but known not to be in the sample.
   [0220] False negatives (FN) (if acrometrix spike-in is used) The number of False Negatives informs on the number of mutations that were present but not identified.
[0221] On/Off Target is the percentage of mapped reads that were aligned/not aligned over a target region. This metric is used to ensure the technology amplifies predominantly the targets to which the panel was designed.
[0222] Low quality is tracked to ensure the data is worth analyzing. This metric is a general system metric and isn't directly related to this technology.

TABLE 1
Precision Assay Gene Content by Variant Class

| | | | Inter-Genetic | Intra-Genetic |
|---|---|---|---|---|
| DNA Hotspots | | CNV | Fusions | Fusions |
| AKT1 | GNAS | AR | ALK | AR |
| AKT2 | HRAS | EGFR | BRAF | EGFR |
| AKT3 | IDH1 | ERBB2 | ESR1 | MET |
| ALK | IDH2 | ERBB3 | FGFR1 | |
| AR | KEAP1 | FGFR1 | FGFR2 | |
| ARAF | KIT | FGFR2 | FGFR3 | |
| BRAF | KRAS | FGFR3 | MET | |
| CDK4 | MAP2K1 | KRAS | NRG1 | |
| CHEK2 | MAP2K2 | MET | NTRK1 | |
| CTNNB1 | MET | PIK3CA | NTRK2 | |
| EGFR | NRAS | PTEN | NTRK3 | |
| ERBB2 | NTRK1 | | NUTM1 | |
| ERBB3 | NTRK2 | | RET | |
| ERBB4 | NTRK3 | | ROS1 | |
| ESR1 | PDGFRA | | RSPO2 | |
| FGFR1 | PIK3CA | | RSPO3 | |
| FGFR2 | PTEN | | Bold indicates inclusion of non-targeted | |
| FGFR3 | RAF1 | | fusion detection | |
| FGFR4 | RET (Exon 12) | | 46 | Total Genes |
| FLT3 | RET | | 42 | DNA Hotspot Genes |
| | STK11 | | 11 | CNV Genes |
| | ROS1 | | 16 | Inter-Genetic Fusions |
| | TP53 | | 3 | Intra-Genetic Fusions |

[0223] Clinical evidence is defined as number of instances that a gene/variant combination appears in drug labels, guidelines, and/or clinical trials. Tables 2 and 3 depict top genes/variants and indications relevant to provided assay, as supported by clinical evidence.

TABLE 2
Top 5 assay genes/variant types with the most clinical evidence

ERBB2 (HER2) amplification
EGFR hotspot mutations
BRAF hotspot mutations
KRAS hotspot mutations
ALK fusions

TABLE 3
Top 5 indications with the most clinical evidence

NSCLC
Breast
Colorectal
Melanoma
Kidney

[0224] Up to 29 gene and variant combinations covered under the provided assay are on drug labels and/or guidelines (NCCN and ESMO)

TABLE 4
Cancer Indications Ranked by Clinical Evidence

| | |
|---|---|
| Non-Small Cell Lung Cancer | Thyroid Cancer |
| Unspecified Solid Tumor | Glioblastoma |
| Breast Cancer | Soft Tissue Sarcoma |
| Colorectal Cancer | Gastrointestinal Stromal Tumor |
| Melanoma | Small Cell Lung Cancer |
| Kidney Cancer | Cervical Cancer |
| Gastric Cancer | |
| Ovarian Cancer | |
| Bladder Cancer | |
| Esophageal Cancer | |
| Head and Neck Cancer | |
| Endometrial Cancer | |
| Pancreatic Cancer | |
| Liver Cancer | |

### Example 4 Results

[0225] Primers were designed using the composition design approach provided herein and targeted to oncology genes using those of the panel target genes as described above in Table 1, where the library amplification step utilized two primer pairs (to put the two universal sequences on each end of amplicons, e.g., an A-universal handle and a P1-universal handle on each end) to enable bi-directional sequencing as described herein. Prepared library was sequenced using Ion Gene Studio Templating/and Sequencing kits and instrumentation (Thermo Fisher Scientific, Inc.) and/or a fully integrated library preparation, templating and sequencing system, Genexus (Thermo Fisher Scientific, Inc.). Performance with the instant panel indicates the technology is able to appropriately detect targeted mutations, copy number variations and fusions as intended.

SNV and CNV Detection with Multiple Cancer Type from FFPE

| | | | Reference | | | | |
|---|---|---|---|---|---|---|---|
| | Pathological | | Method | Present | | Reference | Present |
| Tissue | diagnosis | SNV Detected | AF | AF | CNV Detected | Method CN | CN |
| Bladder | Urothelial | N/A | N/A | N/A | ERBB2 | 24.68 | 27.66 |
| | Carcinoma | | | | Amplification | | |
| Brain | Anaplastic | IDH1 COSM28746_p.R132H | 38.60% | 39.50% | N/A | N/A | N/A |
| | Astrocytoma | | | | | | |
| | Glioblastoma | N/A | N/A | N/A | EGFR | 12.13 | 10.09 |
| | multiforme | | | | Amplification | | |
| Breast | Invasive Ductal | PIK3CA COSM757_p.C420R | 31.60% | 30.60% | N/A | N/A | N/A |
| | Carcinoma | N/A | N/A | N/A | PIK3CA | 26.27 | 26.73 |
| | | | | | Amplification | | |
| | | N/A | N/A | N/A | FGFR1 | 11.92 | 11.38 |
| | | | | | Amplification | | |
| Colon | Adenocarcinoma | BRAF COSM476_p.V600E | 38.60% | 38.30% | N/A | N/A | N/A |
| | | KRAS COSM516_p.G12C | 30.60% | 27.20% | N/A | N/A | N/A |
| Lung | Adenocarcinoma | ERBB2 Ex 20 Ins | 40.40% | 41.30% | N/A | N/A | N/A |
| | | COSM12553_p.G776delinsVC | | | | | |
| | | EGFR COSM6224_p.L858R | 24.60% | 25.8 | N/A | N/A | N/A |
| | | EGFR ex 19 del | 33.80% | 29.20% | N/A | N/A | N/A |
| | | COSM12384_p.E746_S752delinsV | | | | | |
| | | N/A | N/A | N/A | MET Amplification | 18.28 | 16.72 |
| | Squamous Cell | N/A | N/A | N/A | PIK3CA | 19.48 | 18.1 |
| | Carcinoma | | | | Amplification | | |
| Small | Metastatic | BRAF COSM476_p.V600E | 57.30% | 55.60% | N/A | N/A | N/A |
| Bowel | Melanoma | | | | | | |
| Thyroid | Papillary | BRAF COSM476_p.V600E | 41.50% | 35.20% | N/A | N/A | N/A |
| | Carcinoma | | | | | | |

Fusion Detection with Multiple Cancer Type from FFPE

| | | | | | Present | |
|---|---|---|---|---|---|---|
| | Pathological | | | Reference | Read | Molecular |
| Origin | diagnosis | Gene | Fusion Isoform | Method | Counts | Coverage |
| Lung | Adenocarcinoma | RET | KIF5B- | Positive | 3630 | 167 |
| | | | RET.K15R12.COSF1232.1 | | | |
| | | ROS1 | SLC34A2- | Positive | 4407 | 268 |
| | | | ROS1.S13R32.COSF1259 | | | |
| | Squamous Cell | ALK | EML4- | Positive | 402 | 20 |
| | Carcinoma | | ALK.E18A20.COSF487.1 | | | |
| Skin | Melanoma | ALK | EML4- | Positive | 646 | 36 |
| | | | ALK.E6aA20.AB374361.1 | | | |
| Thyroid | Papillary | RET | NCOA4- | Positive | 1069 | 108 |
| | Carcinoma | | RET.N7R12.COSF1491.1 | | | |
| | | NTRK3 | ETV6- | Not | 3502 | 629 |
| | | | NTRK3.E4N14.1 | Included | | |
| | | NTRK1 | SQSTM1- | Not | 4455 | 249 |
| | | | NTRK1.S5N10.1 | Included | | |
| Bladder | Urothelial | FGFR3 | FGFR3- | Not | 3591 | 177 |
| | Carcinoma | | TACC3.F17T8.COSF1353 | Included | | |
| Endometrium | Adenocarcinoma | MET | ST7-MET.S1M2 | Not | 302 | 29 |
| | | | | Included | | |
| Large | Adenocarcinoma | RSPO3 | PTPRK- | Not | 2619 | 119 |
| Intestine | | | RSPO3.PIR2.COSF1311.1 | Included | | |
| Prostate | Adenocarcinoma | BRAF | SND1- | Not | 9633 | 1889 |
| | | | BRAF.S10B11 | Included | | |

Detection of variants in clinical plasma samples with known variants

| | | | | | | Reference |
|---|---|---|---|---|---|---|
| | | | | | | Method |
| | | | Variant | | Observed | Observed |
| COSM ID | Gene | Variant | Type | Variant | AF % | AF % |
| COSM12381 | EGFR | Exon 20 Insertion | INDEL | p.N771_H773dup | 35.71% | 52.59% |
| COSM20959 | ERBB2 | Exon 20 Insertion | INDEL | p.Y772_A775dup | 0.94% | 0.89% |
| COSM6240 | EGFR | T790M | SNV | p.T790M | 1.86% | 2.52% |
| COSM6223 | EGFR | Exon 19 Deletion | INDEL | p.E746_A750del | 3.19% | 2.47% |
| COSM476 | BRAF | V600E | SNV | p.V600E | 15.42% | 13.50% |
| COSM516 | KRAS | G12C | SNV | p.G12C | 3.86% | 4.43% |
| COSM6224 | EGFR | L858R | SNV | p.L858R | 4.56% | 3.73% |

| | | Present | | Reference Method | |
|---|---|---|---|---|---|
| | | Read | Mol | Read | Mol |
| Gene | Fusion | Count | Count | Count | Count |
| ROS1 | TPM3- | 3274 | 168 | 689 | 83 |
| | ROS1.T8R35.COSF1273 | | | | |
| RET | KIF5B- | | | | |
| | RET.K23R12.COSF1234 | 1645 | 220 | 1340 | 74 |
| ALK | EML4- | 598 | 67 | 528 | 26 |
| | ALK.E13A20.COSF408.2 | | | | |

[0226] While preferred embodiments of the present invention have been shown and described herein, it will be obvious to those skilled in the art that such embodiments are provided by way of example only. Numerous variations, changes, and substitutions will now occur to those skilled in the art without departing from the invention. It should be understood that various alternatives to the embodiments of the invention described herein may be employed in practicing the invention. It is intended that the following claims define the scope of the invention and that methods and structures within the scope of these claims and their equivalents be covered thereby.

TABLE A
Primer sequences of the present oncology assay, FWD pool and REV pool

| SEQ | | SEQ | |
|---|---|---|---|
| ID | | ID | |
| NO: | PrimerSeqFWD (A) | NO: | PrimerSeqREV (B) |
| 1 | TCTGTACGGTGACAAGGCGULLLACTLLLTG | 994 | TGACAAGGCGTAGTCACGGULLLACTLLLTG |
| | AUCGAGUCGGGCTCUGGA | | AUCCCAUGGCAAACACCAUGA |
| 2 | TCTGTACGGTGACAAGGCGULLLACTLLLTG | 995 | TGACAAGGCGTAGTCACGGULLLACTLLLTG |
| | AUGUGGUGCCGAGCCUCUG | | AUUUCCCUUUUGUACUGAAUUUUAGAUUACU |
| | | | GAT |
| 3 | TCTGTACGGTGACAAGGCGULLLACTLLLTG | 996 | TGACAAGGCGTAGTCACGGULLLACTLLLTG |
| | AUUGCCUCACCUCCACCGT | | AUUAUUUUCAGCCUUCUACUAGUCGAAAGCG |
| 4 | TCTGTACGGTGACAAGGCGULLLACTLLLTG | 997 | TGACAAGGCGTAGTCACGGULLLACTLLLTG |
| | AUGAUGGCCAUGGCGCGGA | | AUAACGACCAAGUCACCAAGGAUG |
| 5 | TCTGTACGGTGACAAGGCGULLLACTLLLTG | 998 | TGACAAGGCGTAGTCACGGULLLACTLLLTG |
| | AUUGUCGUCUCUCCAGCCC | | AUUUUUUCCUCUCACUGGCUUCUCC |
| 6 | TCTGTACGGTGACAAGGCGULLLACTLLLTG | 999 | TGACAAGGCGTAGTCACGGULLLACTLLLTG |
| | AUGGCCCCUGAGCGUCAUC | | AUAAAAACUAUGAUGGUGACGUGCAG |
| 7 | TCTGTACGGTGACAAGGCGULLLACTLLLTG | 1000 | TGACAAGGCGTAGTCACGGULLLACTLLLTG |
| | AUCGUCUGAGGAGCCCGUG | | AUCAGGUCCUCAAGUCUUCGGG |
| 8 | TCTGTACGGTGACAAGGCGULLLACTLLLTG | 1001 | TGACAAGGCGTAGTCACGGULLLACTLLLTG |
| | AUAGCGUCCUCCCAGCGUA | | AUCUCACAGGUCGUGUGUGC |
| 9 | TCTGTACGGTGACAAGGCGULLLACTLLLTG | 1002 | TGACAAGGCGTAGTCACGGULLLACTLLLTG |
| | AUGGCGACCCCCUCAUCAT | | AUACUGGCAUGACCCCCAC |
| 10 | TCTGTACGGTGACAAGGCGULLLACTLLLTG | 1003 | TGACAAGGCGTAGTCACGGULLLACTLLLTG |
| | AUUGAACUACUUGGAGGACCGT | | AUUUACCCUUGGCCGCGUAC |
| 11 | TCTGTACGGTGACAAGGCGULLLACTLLLTG | 1004 | TGACAAGGCGTAGTCACGGULLLACTLLLTG |
| | AUCUGGGACAGUGGGCCAA | | AUGCAUGUUUGUUGGUGAUUCCAAG |
| 12 | TCTGTACGGTGACAAGGCGULLLACTLLLTG | 1005 | TGACAAGGCGTAGTCACGGULLLACTLLLTG |
| | AUCAGCUGGGCCAGAGUGT | | AUCUUGCAGUGGAACUCCACG |
| 13 | TCTGTACGGTGACAAGGCGULLLACTLLLTG | 1006 | TGACAAGGCGTAGTCACGGULLLACTLLLTG |
| | AUAACAUGGCCUCCUCCGC | | AUAGCCUCUUGCUCAGUUUUAUCUAAGG |
| 14 | TCTGTACGGTGACAAGGCGULLLACTLLLTG | 1007 | TGACAAGGCGTAGTCACGGULLLACTLLLTG |
| | AUCAGGUCCCCAUGGUGGC | | AUUGUCUGUGUAAUCAAACAAGUUUAUAUUU |
| | | | CCC |
| 15 | TCTGTACGGTGACAAGGCGULLLACTLLLTG | 1008 | TGACAAGGCGTAGTCACGGULLLACTLLLTG |
| | AUGGGCGCCUUCCAUGGAG | | AUAACCAUAUCAAAUUCACACACUGGC |
| 16 | TCTGTACGGTGACAAGGCGULLLACTLLLTG | 1009 | TGACAAGGCGTAGTCACGGULLLACTLLLTG |
| | AUGUGCAGCAGUGGAGCCA | | AUGAAUCUCCAUUUUAGCACUUACCUGUGA |
| 17 | TCTGTACGGTGACAAGGCGULLLACTLLLTG | 1010 | TGACAAGGCGTAGTCACGGULLLACTLLLTG |
| | AUUCCAGGACGUGCUGCUC | | AUGAAUUAAACACACAUCACAUACAUACAAG |
| | | | UCA |
| 18 | TCTGTACGGTGACAAGGCGULLLACTLLLTG | 1011 | TGACAAGGCGTAGTCACGGULLLACTLLLTG |
| | AUCUGGGCAACGUGGUUGG | | AUAAGCAUCAGCAUUUGACUUUACCUUAUC |
| 19 | TCTGTACGGTGACAAGGCGULLLACTLLLTG | 1012 | TGACAAGGCGTAGTCACGGULLLACTLLLTG |
| | AUUCCAUCGAGCCUCCGAC | | AUAAGCCGAAGGUCACAAAGUC |
| 20 | TCTGTACGGTGACAAGGCGULLLACTLLLTG | 1013 | TGACAAGGCGTAGTCACGGULLLACTLLLTG |
| | AUGCUGCAACCUGCAGCAC | | AUAGAAUAGGAUAUUGUAUCAUACCAAUUUC |
| | | | UCG |
| 21 | TCTGTACGGTGACAAGGCGULLLACTLLLTG | 1014 | TGACAAGGCGTAGTCACGGULLLACTLLLTG |
| | AUUUUUGGUGGCACGCAGC | | AUACCUUCAGCACUCUGCUUGUG |
| 22 | TCTGTACGGTGACAAGGCGULLLACTLLLTG | 1015 | TGACAAGGCGTAGTCACGGULLLACTLLLTG |
| | AUUGUCUUCCCCAACGGCA | | AUCCACAUCCUCUUCCUCAGGAUT |
| 23 | TCTGTACGGTGACAAGGCGULLLACTLLLTG | 1016 | TGACAAGGCGTAGTCACGGULLLACTLLLTG |
| | AUGGCGUGGAGCUAUGGGT | | AUCUUCACCUUUAACACCUCCAGUCC |
| 24 | TCTGTACGGTGACAAGGCGULLLACTLLLTG | 1017 | TGACAAGGCGTAGTCACGGULLLACTLLLTG |
| | AUCCUGCCCCCACUCCCAG | | AUCGUUGAAGCACUGGAUCCACUT |
| 25 | TCTGTACGGTGACAAGGCGULLLACTLLLTG | 1018 | TGACAAGGCGTAGTCACGGULLLACTLLLTG |
| | AUGAGGCCUCCUGCACUCC | | AUCACCUGGAACUUGGUCUCAAAGAUT |
| 26 | TCTGTACGGTGACAAGGCGULLLACTLLLTG | 1019 | TGACAAGGCGTAGTCACGGULLLACTLLLTG |
| | AUAGGACGGUCGGACUCCC | | AUUGCAGUUGGUGGAACCAUUAACUC |
| 27 | TCTGTACGGTGACAAGGCGULLLACTLLLTG | 1020 | TGACAAGGCGTAGTCACGGULLLACTLLLTG |
| | AUCAGGCGAUGUCGCCGAA | | AUCUUGUGAGUGGAUGGGUAAAACCUAT |
| 28 | TCTGTACGGTGACAAGGCGULLLACTLLLTG | 1021 | TGACAAGGCGTAGTCACGGULLLACTLLLTG |
| | AUGGCUUCGAGGCCGUUGA | | AUUGUGGGUCCUGAAUUGGAGGAAUAT |
| 29 | TCTGTACGGTGACAAGGCGULLLACTLLLTG | 1022 | TGACAAGGCGTAGTCACGGULLLACTLLLTG |
| | AUGCGAAGGCGUCUCCCUG | | AUACACCUGGCCUUCAUACACC |
| 30 | TCTGTACGGTGACAAGGCGULLLACTLLLTG | 1023 | TGACAAGGCGTAGTCACGGULLLACTLLLTG |
| | AUGGCGGCUUGGGAGAAUG | | AUCUCCCCUUCUCUGCCCAGA |
| 31 | TCTGTACGGTGACAAGGCGULLLACTLLLTG | 1024 | TGACAAGGCGTAGTCACGGULLLACTLLLTG |
| | AUCUACACGGUGCGCGAGG | | AUAUUGCAGGCUCACCCCAAT |
| 32 | TCTGTACGGTGACAAGGCGULLLACTLLLTG | 1025 | TGACAAGGCGTAGTCACGGULLLACTLLLTG |
| | AUUGUGUCCAGAGGACCCC | | AUGUGAGCCUGCAAUCCCUG |
| 33 | TCTGTACGGTGACAAGGCGULLLACTLLLTG | 1026 | TGACAAGGCGTAGTCACGGULLLACTLLLTG |
| | AUGGAGCCAUGGGCUGCAT | | AUCCAUGCUGGACCUUCUGCA |
| 34 | TCTGTACGGTGACAAGGCGULLLACTLLLTG | 1027 | TGACAAGGCGTAGTCACGGULLLACTLLLTG |
| | AUCGGCUCAGUGAGGCUCG | | AUCCUCUUGACCUGUCCAGGC |
| 35 | TCTGTACGGTGACAAGGCGULLLACTLLLTG | 1028 | TGACAAGGCGTAGTCACGGULLLACTLLLTG |
| | AUGGUGCCACCCGCCUAUG | | AUGUUGCCACUUUCUCAACUUUCCC |
| 36 | TCTGTACGGTGACAAGGCGULLLACTLLLTG | 1029 | TGACAAGGCGTAGTCACGGULLLACTLLLTG |
| | AUGGAGUGCUGGCAUGCCG | | AUACAUCAGAGAAAGGGACCCUAGT |
| 37 | TCTGTACGGTGACAAGGCGULLLACTLLLTG | 1030 | TGACAAGGCGTAGTCACGGULLLACTLLLTG |
| | AUGCUGGUGGAGGACCUGG | | AUCAACCUUGUCCUAACCUCUCUCC |
| 38 | TCTGTACGGTGACAAGGCGULLLACTLLLTG | 1031 | TGACAAGGCGTAGTCACGGULLLACTLLLTG |
| | AUUUGGCACUGAGGGUCGC | | AUCCUCAUUUCUCCUCCAUCCUCAG |
| 39 | TCTGTACGGTGACAAGGCGULLLACTLLLTG | 1032 | TGACAAGGCGTAGTCACGGULLLACTLLLTG |
| | AUGAACCCGCGCUCUCUGA | | AUAUCAGAACUGCCGACCACA |
| 40 | TCTGTACGGTGACAAGGCGULLLACTLLLTG | 1033 | TGACAAGGCGTAGTCACGGULLLACTLLLTG |
| | AUAGAGCUCGGCUGUUCCA | | AUCUAGAUAUGGUUAAGAAAACUGUUCCAAU |
| | | | ACA |
| 41 | TCTGTACGGTGACAAGGCGULLLACTLLLTG | 1034 | TGACAAGGCGTAGTCACGGULLLACTLLLTG |
| | AUCCUCAGAGCCCCACCUG | | AUCUGCUGUGUGCUGGCAGAT |
| 42 | TCTGTACGGTGACAAGGCGULLLACTLLLTG | 1035 | TGACAAGGCGTAGTCACGGULLLACTLLLTG |
| | AUCGUGCUGGAGAGACCCC | | AUCCAGAUCAUCCGCGAGCT |
| 43 | TCTGTACGGTGACAAGGCGULLLACTLLLTG | 1036 | TGACAAGGCGTAGTCACGGULLLACTLLLTG |
| | AUGGGAGCCGUCAACGAUG | | AUCUGGAUCCUCAGGACUCUGUCT |
| 44 | TCTGTACGGTGACAAGGCGULLLACTLLLTG | 1037 | TGACAAGGCGTAGTCACGGULLLACTLLLTG |
| | AUCGUGCCCUCCGUGUUCA | | AUCAUCUGCAUGGUACUCUGUCUCG |
| 45 | TCTGTACGGTGACAAGGCGULLLACTLLLTG | 1038 | TGACAAGGCGTAGTCACGGULLLACTLLLTG |
| | AUCCGGCGUCCACAACUCA | | AUAGAAGGCGGGAGACAUAUGG |
| 46 | TCTGTACGGTGACAAGGCGULLLACTLLLTG | 1039 | TGACAAGGCGTAGTCACGGULLLACTLLLTG |
| | AUAGGAGAUGCCGUCGGUG | | AUCGGUUUUCCCGGACAUGGT |
| 47 | TCTGTACGGTGACAAGGCGULLLACTLLLTG | 1040 | TGACAAGGCGTAGTCACGGULLLACTLLLTG |
| | AUGCUGGCCUUCGUACGGG | | AUCCCAUCACACACCAUAACUCC |
| 48 | TCTGTACGGTGACAAGGCGULLLACTLLLTG | 1041 | TGACAAGGCGTAGTCACGGULLLACTLLLTG |
| | AUAUCUGCCAGCGGCUCAG | | AUCUCUUGACCAGCACGUUCC |
| 49 | TCTGTACGGTGACAAGGCGULLLACTLLLTG | 1042 | TGACAAGGCGTAGTCACGGULLLACTLLLTG |
| | AUAGCUGCAUGAUCUGCGG | | AUUCCUUCCUGUCCUCCUAGCA |
| 50 | TCTGTACGGTGACAAGGCGULLLACTLLLTG | 1043 | TGACAAGGCGTAGTCACGGULLLACTLLLTG |
| | AUGCCGUCAUGAGACCCGA | | AUCGCAUCGUGUACUUCCGGAT |
| 51 | TCTGTACGGTGACAAGGCGULLLACTLLLTG | 1044 | TGACAAGGCGTAGTCACGGULLLACTLLLTG |
| | AUCAGCCUCUCUGCCCAGC | | AUCACUUCUCACACCGCUGUGUT |
| 52 | TCTGTACGGTGACAAGGCGULLLACTLLLTG | 1045 | TGACAAGGCGTAGTCACGGULLLACTLLLTG |
| | AUCGUUCUGCCUCCCGUGG | | AUUGUGGAGUAUUUGGAUGACAGAAACAC |
| 53 | TCTGTACGGTGACAAGGCGULLLACTLLLTG | 1046 | TGACAAGGCGTAGTCACGGULLLACTLLLTG |
| | AUAGCCGACCUUGAGGCUG | | AUAGACGACAGGGCUGGUT |
| 54 | TCTGTACGGTGACAAGGCGULLLACTLLLTG | 1047 | TGACAAGGCGTAGTCACGGULLLACTLLLTG |
| | AUCCCUCUCAUGCCCGCAG | | AUGCUGAAACAAAAAGCACUCUUCUGUC |
| 55 | TCTGTACGGTGACAAGGCGULLLACTLLLTG | 1048 | TGACAAGGCGTAGTCACGGULLLACTLLLTG |
| | AUGUCCCAGUGGCCCUCGG | | AUUGGCCAUCUACAAGCAGUCA |
| 56 | TCTGTACGGTGACAAGGCGULLLACTLLLTG | 1049 | TGACAAGGCGTAGTCACGGULLLACTLLLTG |
| | AUGAGGCCACUGGGUCACC | | AUUUCCUACAGUACUCCCCUGCC |
| 57 | TCTGTACGGTGACAAGGCGULLLACTLLLTG | 1050 | TGACAAGGCGTAGTCACGGULLLACTLLLTG |
| | AUCUGGAGAUGGCCCGACA | | AUUGCCUCUUGCUUCUCUUUUCCT |
| 58 | TCTGTACGGTGACAAGGCGULLLACTLLLTG | 1051 | TGACAAGGCGTAGTCACGGULLLACTLLLTG |
| | AUCACCGUCUCCUCGGAGC | | AUUUGGCUCUGACUGUACCACC |
| 59 | TCTGTACGGTGACAAGGCGULLLACTLLLTG | 1052 | TGACAAGGCGTAGTCACGGULLLACTLLLTG |
| | AUGUGCUCCCAGCAAGCGA | | AUUUACAGCCCUGGAUUUGUCAAGUT |
| 60 | TCTGTACGGTGACAAGGCGULLLACTLLLTG | 1053 | TGACAAGGCGTAGTCACGGULLLACTLLLTG |
| | AUAUCACCGCAUCGUGCAG | | AUCUAGUCCCUGGCUGGACCA |
| 61 | TCTGTACGGTGACAAGGCGULLLACTLLLTG | 1054 | TGACAAGGCGTAGTCACGGULLLACTLLLTG |
| | AUAUCCGCUCGUCCACCAG | | AUCUCACAGAGUUCAAGCUGAAGAAGAT |
| 62 | TCTGTACGGTGACAAGGCGULLLACTLLLTG | 1055 | TGACAAGGCGTAGTCACGGULLLACTLLLTG |
| | AUGCUCGCCCACGAGUAGC | | AUAACCUGCAGCAUGAGCAC |
| 63 | TCTGTACGGTGACAAGGCGULLLACTLLLTG | 1056 | TGACAAGGCGTAGTCACGGULLLACTLLLTG |
| | AUCAGCGCCACCUGCUGAC | | AUCUGGUUGGAGCGAAUCUGCUAG |
| 64 | TCTGTACGGTGACAAGGCGULLLACTLLLTG | 1057 | TGACAAGGCGTAGTCACGGULLLACTLLLTG |
| | AUCCGCCUCUCACCAUCGA | | AUCUUGUGCCCACGAAGGAGT |
| 65 | TCTGTACGGTGACAAGGCGULLLACTLLLTG | 1058 | TGACAAGGCGTAGTCACGGULLLACTLLLTG |
| | AUCUCGAGCCCGGGAAGUG | | AUAGAUACUGAUCUCGCCAUCGCT |
| 66 | TCTGTACGGTGACAAGGCGULLLACTLLLTG | 1059 | TGACAAGGCGTAGTCACGGULLLACTLLLTG |
| | AUGGGACUCGAUGGACCGC | | AUGAUCUUCUCAAAGUCGUCAUCCUUCA |
| 67 | TCTGTACGGTGACAAGGCGULLLACTLLLTG | 1060 | TGACAAGGCGTAGTCACGGULLLACTLLLTG |
| | AUUACUGCCUGGCUGGCUG | | AUGUAGAGUGUGCGUGGCUCUC |
| 68 | TCTGTACGGTGACAAGGCGULLLACTLLLTG | 1061 | TGACAAGGCGTAGTCACGGULLLACTLLLTG |
| | AUUUGUGCCCACCAGGCAA | | AUGCACCUUCAUUGGCUACAAGG |
| 69 | TCTGTACGGTGACAAGGCGULLLACTLLLTG | 1062 | TGACAAGGCGTAGTCACGGULLLACTLLLTG |
| | AUAAUCUCCUGCGCCCUGG | | AUCGGCCCAACACCUUCAUCAT |
| 70 | TCTGTACGGTGACAAGGCGULLLACTLLLTG | 1063 | TGACAAGGCGTAGTCACGGULLLACTLLLTG |
| | AUCUGAUUGCUCCGGCCGT | | AUAAAAUCUGUUUUCCAAUAAAUUCUCAGAU |
| | | | CCA |
| 71 | TCTGTACGGTGACAAGGCGULLLACTLLLTG | 1064 | TGACAAGGCGTAGTCACGGULLLACTLLLTG |
| | AUCUGGAGGCACUGAGGCG | | AUAUCUGAUCCUAAAACCCAGCCUCT |
| 72 | TCTGTACGGTGACAAGGCGULLLACTLLLTG | 1065 | TGACAAGGCGTAGTCACGGULLLACTLLLTG |
| | AUCUCCGCCAUGCAAGGCT | | AUCACGGGAAAGUGGUGAAGAUAUGUG |
| 73 | TCTGTACGGTGACAAGGCGULLLACTLLLTG | 1066 | TGACAAGGCGTAGTCACGGULLLACTLLLTG |
| | AUGGUCCAGGGAGAGCCUG | | AUCUGAAAUUGGUGUCGGUGCCUA |
| 74 | TCTGTACGGTGACAAGGCGULLLACTLLLTG | 1067 | TGACAAGGCGTAGTCACGGULLLACTLLLTG |
| | AUGUCCGACUCCGAGGACG | | AUGAUCAUUGUUCCUUCCCCUCAGAC |
| 75 | TCTGTACGGTGACAAGGCGULLLACTLLLTG | 1068 | TGACAAGGCGTAGTCACGGULLLACTLLLTG |
| | AUCUGCUGCAGAACGGGAG | | AUGAGUCCACAGUCUGGAAGCG |
| 76 | TCTGTACGGTGACAAGGCGULLLACTLLLTG | 1069 | TGACAAGGCGTAGTCACGGULLLACTLLLTG |
| | AUUGUCGUUCCGCUUCGGG | | AUUAUCACAGAAUUCCUCCAGGCUUCT |
| 77 | TCTGTACGGTGACAAGGCGULLLACTLLLTG | 1070 | TGACAAGGCGTAGTCACGGULLLACTLLLTG |
| | AUUCCAGCAAGGCCUGGUG | | AUAUCUACUUCCAUCUUGUCAGGAGGAC |
| 78 | TCTGTACGGTGACAAGGCGULLLACTLLLTG | 1071 | TGACAAGGCGTAGTCACGGULLLACTLLLTG |
| | AUGCUAGCUUUGGCGAGGG | | AUCCCAAAUAUCCCCAGUUUCCAGAAUC |
| 79 | TCTGTACGGTGACAAGGCGULLLACTLLLTG | 1072 | TGACAAGGCGTAGTCACGGULLLACTLLLTG |
| | AUUGAGCUUGCCCUGACCC | | AUCAUCGUAGACCUGGGUCCCT |
| 80 | TCTGTACGGTGACAAGGCGULLLACTLLLTG | 1073 | TGACAAGGCGTAGTCACGGULLLACTLLLTG |
| | AUAUGAGGGCGAUGGGCUG | | AUGUCCCGUGAGCACAAUCUCAA |
| 81 | TCTGTACGGTGACAAGGCGULLLACTLLLTG | 1074 | TGACAAGGCGTAGTCACGGULLLACTLLLTG |
| | AUCAGUGAGCUGCCUGCGT | | AUCCCUUCUCUGUCUCCCUUGGA |
| 82 | TCTGTACGGTGACAAGGCGULLLACTLLLTG | 1075 | TGACAAGGCGTAGTCACGGULLLACTLLLTG |
| | AUCUGCGGCGAGUCCUGAG | | AUUAAGGCCUGCUGAAAAUGACUGAA |
| 83 | TCTGTACGGTGACAAGGCGULLLACTLLLTG | 1076 | TGACAAGGCGTAGTCACGGULLLACTLLLTG |
| | AUUGGCUCCGGGUGACAGC | | AUAGAAACCUGUCUCUUGGAUAUUCUCG |
| 84 | TCTGTACGGTGACAAGGCGULLLACTLLLTG | 1077 | TGACAAGGCGTAGTCACGGULLLACTLLLTG |
| | AUAGAGCGGACUCCCCUCG | | AUCUCAGGACUUAGCAAGAAGUUAUGG |
| 85 | TCTGTACGGTGACAAGGCGULLLACTLLLTG | 1078 | TGACAAGGCGTAGTCACGGULLLACTLLLTG |
| | AUGUCCAGCAUCCGACCAC | | AUUCCCAGAGAACAAAUUAAAAGAGUUAAGG |
| | | | A |
| 86 | TCTGTACGGTGACAAGGCGULLLACTLLLTG | 1079 | TGACAAGGCGTAGTCACGGULLLACTLLLTG |
| | AUGUCCCUGCUGUCUGCCG | | AUGAAGGGAGUCACUCUGGUUUGG |
| 87 | TCTGTACGGTGACAAGGCGULLLACTLLLTG | 1080 | TGACAAGGCGTAGTCACGGULLLACTLLLTG |
| | AUAGAUGCAGCCGUGCCAG | | AUCAAUGCCGAUGGCCUCC |
| 88 | TCTGTACGGTGACAAGGCGULLLACTLLLTG | 1081 | TGACAAGGCGTAGTCACGGULLLACTLLLTG |
| | AUGCUCGGCAGCCGCAGAA | | AUAUGACGGAAUAUAAGCUGGUGGT |
| 89 | TCTGTACGGTGACAAGGCGULLLACTLLLTG | 1082 | TGACAAGGCGTAGTCACGGULLLACTLLLTG |
| | AUCUCCAGGAGGUGGAGGG | | AUAUUCCUACCGGAAGCAGGT |
| 90 | TCTGTACGGTGACAAGGCGULLLACTLLLTG | 1083 | TGACAAGGCGTAGTCACGGULLLACTLLLTG |
| | AUUUCCUGAGCCAGCAGGG | | AUCCCAGUUGUGGGUACCUUUAGAUUC |
| 91 | TCTGTACGGTGACAAGGCGULLLACTLLLTG | 1084 | TGACAAGGCGTAGTCACGGULLLACTLLLTG |
| | AUCUCCAUUCCCGGGAGGG | | AUUCCGAAUAUAGAGAACCUCAAUCUCUUUG |
| | | | T |
| 92 | TCTGTACGGTGACAAGGCGULLLACTLLLTG | 1085 | TGACAAGGCGTAGTCACGGULLLACTLLLTG |
| | AUAGGCUCCACCUCAGCAG | | AUAGAUGGAGAUGAUGAAGAUGAUUGGG |
| 93 | TCTGTACGGTGACAAGGCGULLLACTLLLTG | 1086 | TGACAAGGCGTAGTCACGGULLLACTLLLTG |
| | AUCUGAAGUCAGCCGGCUC | | AUUCUCUUUAGGGAGCUUCUCUUCUUCC |
| 94 | TCTGTACGGTGACAAGGCGULLLACTLLLTG | 1087 | TGACAAGGCGTAGTCACGGULLLACTLLLTG |
| | AUCCAGGACGCCUUCUGCA | | AUGACUUGGUGUCAUGCACCUACC |
| 95 | TCTGTACGGTGACAAGGCGULLLACTLLLTG | 1088 | TGACAAGGCGTAGTCACGGULLLACTLLLTG |
| | AUAUGCCCAGGCUGGGAAG | | AUCCAGAAAUGUUUUGGUAACAGAAAACAA |
| 96 | TCTGTACGGTGACAAGGCGULLLACTLLLTG | 1089 | TGACAAGGCGTAGTCACGGULLLACTLLLTG |
| | AUCCUCACCACGAGCUGCC | | AUGCCAGAGAAAAGAGAGUUACUCACAC |
| 97 | TCTGTACGGTGACAAGGCGULLLACTLLLTG | 1090 | TGACAAGGCGTAGTCACGGULLLACTLLLTG |
| | AUGCUGGACCAGACCCUGC | | AUUGAACUGCUAGCCUCUGGAUUT |
| 98 | TCTGTACGGTGACAAGGCGULLLACTLLLTG | 1091 | TGACAAGGCGTAGTCACGGULLLACTLLLTG |
| | AUCAUGAGUCGGCCUGUGG | | AUAGUGCCACUGGUCUAUAAUCCAGA |
| 99 | TCTGTACGGTGACAAGGCGULLLACTLLLTG | 1092 | TGACAAGGCGTAGTCACGGULLLACTLLLTG |
| | AUCCCACCCUUCCGACCUC | | AUGUGCCUUUAAAAAUUUGCCCCGAT |
| 100 | TCTGTACGGTGACAAGGCGULLLACTLLLTG | 1093 | TGACAAGGCGTAGTCACGGULLLACTLLLTG |
| | AUUCUUCCCGGGUCCCGAG | | AUGCUUUUCCAUCUUUUCUGUGUUGGT |
| 101 | TCTGTACGGTGACAAGGCGULLLACTLLLTG | 1094 | TGACAAGGCGTAGTCACGGULLLACTLLLTG |
| | AUCGGUGGGCAGCCAGGAG | | AUCUGAUAAAGCACCCUCCAUCGUT |
| 102 | TCTGTACGGTGACAAGGCGULLLACTLLLTG | 1095 | TGACAAGGCGTAGTCACGGULLLACTLLLTG |
| | AUCCCGCACGUGUGAAGGC | | AUAUUCGGACACACUGGCUGUAC |
| 103 | TCTGTACGGTGACAAGGCGULLLACTLLLTG | 1096 | TGACAAGGCGTAGTCACGGULLLACTLLLTG |
| | AUAUGAGUGGGCAGGAGGC | | AUCUCUCCUUCCUCCUGUAGUUUCAGA |
| 104 | TCTGTACGGTGACAAGGCGULLLACTLLLTG | 1097 | TGACAAGGCGTAGTCACGGULLLACTLLLTG |
| | AUCCAGUGGAGGCCGGAUG | | AUAGAAAAUCAAAGCAUUCUUACCUUACUAC |
| | | | A |
| 105 | TCTGTACGGTGACAAGGCGULLLACTLLLTG | 1098 | TGACAAGGCGTAGTCACGGULLLACTLLLTG |
| | AUCCCUCGGGCAGUGACAC | | AUAUCAUUUCUGCUGGCGCACA |
| 106 | TCTGTACGGTGACAAGGCGULLLACTLLLTG | 1099 | TGACAAGGCGTAGTCACGGULLLACTLLLTG |
| | AUGAGCCGUGCAGCGAUUG | | AUGAAAGAGAAGUGCAUGUGCAAGAC |
| 107 | TCTGTACGGTGACAAGGCGULLLACTLLLTG | 1100 | TGACAAGGCGTAGTCACGGULLLACTLLLTG |
| | AUGCCCACUGUGCUUCCUC | | AUCAUAGGCAAGAAGAUGGAACAGAUGA |
| 108 | TCTGTACGGTGACAAGGCGULLLACTLLLTG | 1101 | TGACAAGGCGTAGTCACGGULLLACTLLLTG |
| | AUCGUUCGCGCACACCCUA | | AUGCAGUCCGGCUUGGAGG |
| 109 | TCTGTACGGTGACAAGGCGULLLACTLLLTG | 1102 | TGACAAGGCGTAGTCACGGULLLACTLLLTG |
| | AUCUGCGUCUGCUGUUGCT | | AUGGCCAUGAAUUCGUCAGCUAGUUT |
| 110 | TCTGTACGGTGACAAGGCGULLLACTLLLTG | 1103 | TGACAAGGCGTAGTCACGGULLLACTLLLTG |
| | AUCCAACGGCAGCUUCGUG | | AUCCUUCCUGGUUGGCCGUUAUAT |
| 111 | TCTGTACGGTGACAAGGCGULLLACTLLLTG | 1104 | TGACAAGGCGTAGTCACGGULLLACTLLLTG |
| | AUGAGCUGGUGGAGGCUGAC | | AUCAAAAAGGGAUUCAAUUGCCAUCCA |
| 112 | TCTGTACGGTGACAAGGCGULLLACTLLLTG | 1105 | TGACAAGGCGTAGTCACGGULLLACTLLLTG |
| | AUGCUGCCCGUGAAGUGGAT | | AUUACUCCACAGUGAGCUCGAUCC |
| 113 | TCTGTACGGTGACAAGGCGULLLACTLLLTG | 1106 | TGACAAGGCGTAGTCACGGULLLACTLLLTG |
| | AUACCUGCAACUGCUUCCCT | | AUGAGUUGAGAGAAACACAUUUUUGGG |
| 114 | TCTGTACGGTGACAAGGCGULLLACTLLLTG | 1107 | TGACAAGGCGTAGTCACGGULLLACTLLLTG |
| | AUGAGAGUGGGCGAGUUUGC | | AUUUUGUUGGCGGGCAACC |
| 115 | TCTGTACGGTGACAAGGCGULLLACTLLLTG | 1108 | TGACAAGGCGTAGTCACGGULLLACTLLLTG |
| | AUUGGCUCCUGACCUGGAGT | | AUCAGAGUUCAUGGAUGCACUGGA |
| 116 | TCTGTACGGTGACAAGGCGULLLACTLLLTG | 1109 | TGACAAGGCGTAGTCACGGULLLACTLLLTG |
| | AUAGGCCCUCCCAGAAGGUC | | AUGCACCUGGCUCCUCUUCAC |
| 117 | TCTGTACGGTGACAAGGCGULLLACTLLLTG | 1110 | TGACAAGGCGTAGTCACGGULLLACTLLLTG |
| | AUCUGCCUGACAUCCACGGT | | AUGGCUCUCGCGGAGGAAG |
| 118 | TCTGTACGGTGACAAGGCGULLLACTLLLTG | 1111 | TGACAAGGCGTAGTCACGGULLLACTLLLTG |
| | AUGGGCAUGGUCCACCACAG | | AUCUAGUUGCAUGGGUGGCG |
| 119 | TCTGTACGGTGACAAGGCGULLLACTLLLTG | 1112 | TGACAAGGCGTAGTCACGGULLLACTLLLTG |
| | AUCAUGGCACAGCCUCCCUT | | AUCGUUGAACUCUGACAGCAGGT |
| 120 | TCTGTACGGTGACAAGGCGULLLACTLLLTG | 1113 | TGACAAGGCGTAGTCACGGULLLACTLLLTG |
| | AUACACAGCUGGGCGCUUUG | | AUCAGCUGGCCUUACCAUCCUG |
| 121 | TCTGTACGGTGACAAGGCGULLLACTLLLTG | 1114 | TGACAAGGCGTAGTCACGGULLLACTLLLTG |
| | AUUUCAGGCGCCAAGUAGGT | | AUCACUUAAUUUGGAUUGUGGCACAGA |
| 122 | TCTGTACGGTGACAAGGCGULLLACTLLLTG | 1115 | TGACAAGGCGTAGTCACGGULLLACTLLLTG |
| | AUCUCACCAUGCUGCAGCAC | | AUUACAUCAUGAGAGGAAUGCAGGAAT |
| 123 | TCTGTACGGTGACAAGGCGULLLACTLLLTG | 1116 | TGACAAGGCGTAGTCACGGULLLACTLLLTG |
| | AUUAGAUGGACGCACUGGGC | | AUCAAAGAUGCAGAGCUCUGAGUAGAAC |
| 124 | TCTGTACGGTGACAAGGCGULLLACTLLLTG | 1117 | TGACAAGGCGTAGTCACGGULLLACTLLLTG |
| | AUAAAGCCGGCUACGCGCUG | | AUGGAGGUGGUGGUGGUCCC |
| 125 | TCTGTACGGTGACAAGGCGULLLACTLLLTG | 1118 | TGACAAGGCGTAGTCACGGULLLACTLLLTG |
| | AUCCAGCCCCUCCUCAGAUG | | AUCACCCCAGCAAAGCAUUUUAAGAUC |
| 126 | TCTGTACGGTGACAAGGCGULLLACTLLLTG | 1119 | TGACAAGGCGTAGTCACGGULLLACTLLLTG |
| | AUUCUGUGACAACGGGCUGC | | AUACAUGUAUGCCAGCUGUUAGAGAUT |
| 127 | TCTGTACGGTGACAAGGCGULLLACTLLLTG | 1120 | TGACAAGGCGTAGTCACGGULLLACTLLLTG |
| | AUGUGGACAGCAUCGGGAGC | | AUUACCAGAUAGAACAGACACAGCUACT |
| 128 | TCTGTACGGTGACAAGGCGULLLACTLLLTG | 1121 | TGACAAGGCGTAGTCACGGULLLACTLLLTG |
| | AUGGAACAGGAGCAGCUGCG | | AUGAGCCAUAGUGGAGAGCUGUAAAUT |
| 129 | TCTGTACGGTGACAAGGCGULLLACTLLLTG | 1122 | TGACAAGGCGTAGTCACGGULLLACTLLLTG |
| | AUAUCUCCUGUGUGCCCAGA | | AUGUUCAAAUGAGUAGACACAGCUUGAG |
| 130 | TCTGTACGGTGACAAGGCGULLLACTLLLTG | 1123 | TGACAAGGCGTAGTCACGGULLLACTLLLTG |
| | AUCCCCAAGUCCUCCUUGCC | | AUUUAGAGGGACUCUUCCCAAUGGA |
| 131 | TCTGTACGGTGACAAGGCGULLLACTLLLTG | 1124 | TGACAAGGCGTAGTCACGGULLLACTLLLTG |
| | AUCACAGACAGGCUGUGUGC | | AUUGAAGACAGAUGGCUCAUUCAUAGGAUA |
| 132 | TCTGTACGGTGACAAGGCGULLLACTLLLTG | 1125 | TGACAAGGCGTAGTCACGGULLLACTLLLTG |
| | AUCUCCUGCCAAGAAGGCCA | | AUUUUUUCAGCAUUAACAUGCGUGCT |
| 133 | TCTGTACGGTGACAAGGCGULLLACTLLLTG | 1126 | TGACAAGGCGTAGTCACGGULLLACTLLLTG |
| | AUCCACAAGUCGGACCCCUA | | AUGCAAAUGUAAUCUACCAGGCUUUGG |
| 134 | TCTGTACGGTGACAAGGCGULLLACTLLLTG | 1127 | TGACAAGGCGTAGTCACGGULLLACTLLLTG |
| | AUGCGGAUCUGGAGGAGCAG | | AUCUCUGAAUCUCUGUGCCCUCAG |
| 135 | TCTGTACGGTGACAAGGCGULLLACTLLLTG | 1128 | TGACAAGGCGTAGTCACGGULLLACTLLLTG |
| | AUGAGUGCGGAAGAUUGCCC | | AUCUUGGGCACUUGCACAGAGAT |
| 136 | TCTGTACGGTGACAAGGCGULLLACTLLLTG | 1129 | TGACAAGGCGTAGTCACGGULLLACTLLLTG |
| | AUUACACGUUCACGGUGCCC | | AUUAGAAUGCCAGUUAAUGAAAACAGAACG |
| 137 | TCTGTACGGTGACAAGGCGULLLACTLLLTG | 1130 | TGACAAGGCGTAGTCACGGULLLACTLLLTG |
| | AUCUGGAGGAAGCCCAUCGA | | AUGGUCGCCCUCCACGCAG |
| 138 | TCTGTACGGTGACAAGGCGULLLACTLLLTG | 1131 | TGACAAGGCGTAGTCACGGULLLACTLLLTG |
| | AUCUGGGCUCUUACCGCAAG | | AUCUUACCAGGCAAGGCCUUGG |
| 139 | TCTGTACGGTGACAAGGCGULLLACTLLLTG | 1132 | TGACAAGGCGTAGTCACGGULLLACTLLLTG |
| | AUCCCCAAGAGUGCCAAGUG | | AUUGUACACGUCCCGGGACAT |
| 140 | TCTGTACGGTGACAAGGCGULLLACTLLLTG | 1133 | TGACAAGGCGTAGTCACGGULLLACTLLLTG |
| | AUUCUCGUCUGUCACCCAGG | | AUACUCCUGAACCCUGAAGGC |
| 141 | TCTGTACGGTGACAAGGCGULLLACTLLLTG | 1134 | TGACAAGGCGTAGTCACGGULLLACTLLLTG |
| | AUGGACCAGACGGUCUCAGA | | AUAGACCCAAAGGGCAGUAAGAUAGG |
| 142 | TCTGTACGGTGACAAGGCGULLLACTLLLTG | 1135 | TGACAAGGCGTAGTCACGGULLLACTLLLTG |
| | AUAUCCCCAACCGCACUGAG | | AUAUACCCCAGCUCAGAUCUUCUCC |
| 143 | TCTGTACGGTGACAAGGCGULLLACTLLLTG | 1136 | TGACAAGGCGTAGTCACGGULLLACTLLLTG |
| | AUAGUGACGGAGGAGCUUGT | | AUGUUGCCCUUGGAGGCAUAC |
| 144 | TCTGTACGGTGACAAGGCGULLLACTLLLTG | 1137 | TGACAAGGCGTAGTCACGGULLLACTLLLTG |
| | AUAUGGCACUCAGCAGCAAG | | AUGAUCUACUGUUUUCCUUUACUUACUACAC |
| | | | CT |
| 145 | TCTGTACGGTGACAAGGCGULLLACTLLLTG | 1138 | TGACAAGGCGTAGTCACGGULLLACTLLLTG |
| | AUGUGGUGGCCAUAGGAACG | | AUGGGACAUUCACCACAUCGACUA |
| 146 | TCTGTACGGTGACAAGGCGULLLACTLLLTG | 1139 | TGACAAGGCGTAGTCACGGULLLACTLLLTG |
| | AUUUCACGCACUGUCAUGGG | | AUGUGAUGAUUGGGAGAUUCCUGAUG |
| 147 | TCTGTACGGTGACAAGGCGULLLACTLLLTG | 1140 | TGACAAGGCGTAGTCACGGULLLACTLLLTG |
| | AUCCUGAAGAGCACGCCAUG | | AUGGUAAUAGUCGGUGCUGUAGAUAUCC |
| 148 | TCTGTACGGTGACAAGGCGULLLACTLLLTG | 1141 | TGACAAGGCGTAGTCACGGULLLACTLLLTG |
| | AUCAGCUGCACGUUUCCUCC | | AUUUGCCAUCAUUGUCCAACAAAGUC |
| 149 | TCTGTACGGTGACAAGGCGULLLACTLLLTG | 1142 | TGACAAGGCGTAGTCACGGULLLACTLLLTG |
| | AUAGCACCAGCUCACUGCAC | | AUAGGAGUGUGUACUCUUGCAUCG |
| 150 | TCTGTACGGTGACAAGGCGULLLACTLLLTG | 1143 | TGACAAGGCGTAGTCACGGULLLACTLLLTG |
| | AUAUCGUGGCCUUGACCUCC | | AUGUGAGGCAGAUGCCCAGC |
| 151 | TCTGTACGGTGACAAGGCGULLLACTLLLTG | 1144 | TGACAAGGCGTAGTCACGGULLLACTLLLTG |
| | AUGCAGCUGGUGGAAGACCT | | AUCUGCACACACCAGUUGAGC |
| 152 | TCTGTACGGTGACAAGGCGULLLACTLLLTG | 1145 | TGACAAGGCGTAGTCACGGULLLACTLLLTG |
| | AUGACGACUCCGUGUUUGCC | | AUACAGCAAAGCAGAAACUCACAUC |
| 153 | TCTGTACGGTGACAAGGCGULLLACTLLLTG | 1146 | TGACAAGGCGTAGTCACGGULLLACTLLLTG |
| | AUUGCUCACAGUCUCCUGGG | | AUCUGUGCCAGGGACCUUACCUUAUA |
| 154 | TCTGTACGGTGACAAGGCGULLLACTLLLTG | 1147 | TGACAAGGCGTAGTCACGGULLLACTLLLTG |
| | AUGCAACCUCCGUGAGGACG | | AUGUACCGGAGGAAGCGGUT |
| 155 | TCTGTACGGTGACAAGGCGULLLACTLLLTG | 1148 | TGACAAGGCGTAGTCACGGULLLACTLLLTG |
| | AUUGCUGGUGUUGCUGAGGG | | AUUUCCAGACCAGGGUGUUGUUUUC |
| 156 | TCTGTACGGTGACAAGGCGULLLACTLLLTG | 1149 | TGACAAGGCGTAGTCACGGULLLACTLLLTG |
| | AUUGACAGUGCCCAGGGCUC | | AUAAAUAAAGGACCCAUUAGAACCAACUCC |
| 157 | TCTGTACGGTGACAAGGCGULLLACTLLLTG | 1150 | TGACAAGGCGTAGTCACGGULLLACTLLLTG |
| | AUGGCCUGCUCUUCCUUGGG | | AUUUUUUCCAGUUUAUUGUAUUUGCAUAGCA |
| | | | CA |
| 158 | TCTGTACGGTGACAAGGCGULLLACTLLLTG | 1151 | TGACAAGGCGTAGTCACGGULLLACTLLLTG |
| | AUUUGGGUUUCGAGGCCAAC | | AUGGAUGCCUGACCAGUUAGAGG |
| 159 | TCTGTACGGTGACAAGGCGULLLACTLLLTG | 1152 | TGACAAGGCGTAGTCACGGULLLACTLLLTG |
| | AUGGGCUUUCCUCCUGCGUC | | AUAGACUGCUAAGGCAUAGGAAUUUUCG |
| 160 | TCTGTACGGTGACAAGGCGULLLACTLLLTG | 1153 | TGACAAGGCGTAGTCACGGULLLACTLLLTG |
| | AUUAAUGCUGGGACGCUGCC | | AUCCGUCUCCUCCACGGAUG |
| 161 | TCTGTACGGTGACAAGGCGULLLACTLLLTG | 1154 | TGACAAGGCGTAGTCACGGULLLACTLLLTG |
| | AUCUCCACCACCACUUCCCC | | AUGUCCUUCUCUUCCAGAGACUUCAG |
| 162 | TCTGTACGGTGACAAGGCGULLLACTLLLTG | 1155 | TGACAAGGCGTAGTCACGGULLLACTLLLTG |
| | AUUGGAGAUCCACGCCUACC | | AUAAACAGUAGCUUCCCUGGGT |
| 163 | TCTGTACGGTGACAAGGCGULLLACTLLLTG | 1156 | TGACAAGGCGTAGTCACGGULLLACTLLLTG |
| | AUGCGAAGCUUCGAGACCUG | | AUCAGCAUCCAACAAGGCACUGA |
| 164 | TCTGTACGGTGACAAGGCGULLLACTLLLTG | 1157 | TGACAAGGCGTAGTCACGGULLLACTLLLTG |
| | AUUUCAGAGGAGGUCGUGGG | | AUACUGCUGUUCCUUCAUACACUUC |
| 165 | TCTGTACGGTGACAAGGCGULLLACTLLLTG | 1158 | TGACAAGGCGTAGTCACGGULLLACTLLLTG |
| | AUCUGGCAAGCUCCUUCCUG | | AUCUCCACCCCUGAAGCCUG |
| 166 | TCTGTACGGTGACAAGGCGULLLACTLLLTG | 1159 | TGACAAGGCGTAGTCACGGULLLACTLLLTG |
| | AUCUGCCGAGAAGCCAGUCA | | AUGCUCACAGAAAUGUCUGCUAUACUGA |
| 167 | TCTGTACGGTGACAAGGCGULLLACTLLLTG | 1160 | TGACAAGGCGTAGTCACGGULLLACTLLLTG |
| | AUCUGCAACGGAAGCACUGG | | AUGGUGUGAAAUGACUGAGUACAAACUG |
| 168 | TCTGTACGGTGACAAGGCGULLLACTLLLTG | 1161 | TGACAAGGCGTAGTCACGGULLLACTLLLTG |
| | AUGUGGAGUGGCAGCAGAAG | | AUUGUAGACUUGGAAUCUACUGAUAUCCCT |
| 169 | TCTGTACGGTGACAAGGCGULLLACTLLLTG | 1162 | TGACAAGGCGTAGTCACGGULLLACTLLLTG |
| | AUGCUGGAGGAGCAGCUUGA | | AUUGGAGUUUGUCUGCUGAAUGAACC |
| 170 | TCTGTACGGTGACAAGGCGULLLACTLLLTG | 1163 | TGACAAGGCGTAGTCACGGULLLACTLLLTG |
| | AUUUCCGAGCCAAUCACGGG | | AUCUUGGAGCUGGAGCUCUUGUG |
| 171 | TCTGTACGGTGACAAGGCGULLLACTLLLTG | 1164 | TGACAAGGCGTAGTCACGGULLLACTLLLTG |
| | AUACAUCUCCUACGCCCUGG | | AUAUUGAUUGUUUCUAAUAGAGCAGCCAGA |
| 172 | TCTGTACGGTGACAAGGCGULLLACTLLLTG | 11.65 | TGACAAGGCGTAGTCACGGULLLACTLLLTG |
| | AUACCACCUGCUCCUUCCAG | | AUAGAGCCUAAACAUCCCCUUAAAUUGG |
| 173 | TCTGTACGGTGACAAGGCGULLLACTLLLTG | 1166 | TGACAAGGCGTAGTCACGGULLLACTLLLTG |
| | AUAGACACGGUGGUACUGGC | | AUUGGUGAAACCUGUUUGUUGGACAUA |
| 174 | TCTGTACGGTGACAAGGCGULLLACTLLLTG | 1167 | TGACAAGGCGTAGTCACGGULLLACTLLLTG |
| | AUCCGAUUGCAGCUCAUGCT | | AUCCUGACCCAAGAUGAAAUAAAACGUC |
| 175 | TCTGTACGGTGACAAGGCGULLLACTLLLTG | 1168 | TGACAAGGCGTAGTCACGGULLLACTLLLTG |
| | AUCUCUGGAAGCCAAGGCAG | | AUUGAAACUAAAAAUCCUUUGCAGGACUG |
| 176 | TCTGTACGGTGACAAGGCGULLLACTLLLTG | 1169 | TGACAAGGCGTAGTCACGGULLLACTLLLTG |
| | AUCAUUGGCCAAGGAGUGCC | | AUUCUUUGUGAUCCGACCAUGAGUAAG |
| 177 | TCTGTACGGTGACAAGGCGULLLACTLLLTG | 1170 | TGACAAGGCGTAGTCACGGULLLACTLLLTG |
| | AUUCUGGCGGAGCAGAUGAG | | AUGAAUCCUGCUGCCACACAUUG |
| 178 | TCTGTACGGTGACAAGGCGULLLACTLLLTG | 1171 | TGACAAGGCGTAGTCACGGULLLACTLLLTG |
| | AUGAUACCCGGACCCUGGAG | | AUGAGGAUGAGCCUGACCAGUG |
| 179 | TCTGTACGGTGACAAGGCGULLLACTLLLTG | 1172 | TGACAAGGCGTAGTCACGGULLLACTLLLTG |
| | AUGAGAUCGCCGCCCUCAUT | | AUUGUUUCCAAAUGACAACCAGGACAA |
| 180 | TCTGTACGGTGACAAGGCGULLLACTLLLTG | 1173 | TGACAAGGCGTAGTCACGGULLLACTLLLTG |
| | AUCUGCACGCAGCCCAAAUC | | AUGAGCCCAGGCCUUUCUUG |
| 181 | TCTGTACGGTGACAAGGCGULLLACTLLLTG | 1174 | TGACAAGGCGTAGTCACGGULLLACTLLLTG |
| | AUACAUCCUGUUGCACCCCA | | AUAAAAGACUCGGAUGAUGUACCUAUGG |
| 182 | TCTGTACGGTGACAAGGCGULLLACTLLLTG | 1175 | TGACAAGGCGTAGTCACGGULLLACTLLLTG |
| | AUUCGCCACCUCCAACCAUC | | AUCUGGCCAAGAGUUACGGGAUUC |
| 183 | TCTGTACGGTGACAAGGCGULLLACTLLLTG | 1176 | TGACAAGGCGTAGTCACGGULLLACTLLLTG |
| | AUAGGUGCGCAAGGUGAAAT | | AUAGUGACAGAAAGGUAAAGAGGAGC |
| 184 | TCTGTACGGTGACAAGGCGULLLACTLLLTG | 1177 | TGACAAGGCGTAGTCACGGULLLACTLLLTG |
| | AUACUUGCUGGAUGGGCCUG | | AUGCUGCCGAAGACCAACUG |
| 185 | TCTGTACGGTGACAAGGCGULLLACTLLLTG | 1178 | TGACAAGGCGTAGTCACGGULLLACTLLLTG |
| | AUCUGAAGGAGGGUCACCGC | | AUGACAGCGGCUGCGAUCA |
| 186 | TCTGTACGGTGACAAGGCGULLLACTLLLTG | 1179 | TGACAAGGCGTAGTCACGGULLLACTLLLTG |
| | AUAGUGUGCCAGUAGCCGUG | | AUUCAUACCUACCUCUGCAAUUAAAUUUGG |
| 187 | TCTGTACGGTGACAAGGCGULLLACTLLLTG | 1180 | TGACAAGGCGTAGTCACGGULLLACTLLLTG |
| | AUGCAUCUGGAGCUCCGUGA | | AUUUAAGUGACAUACCAAUUUGUACAACAGU |
| | | | UAUC |
| 188 | TCTGTACGGTGACAAGGCGULLLACTLLLTG | 1181 | TGACAAGGCGTAGTCACGGULLLACTLLLTG |
| | AUAGAGAACGUGGUGGGCAT | | AUUGAGCCCACCUGACUUGG |
| 189 | TCTGTACGGTGACAAGGCGULLLACTLLLTG | 1182 | TGACAAGGCGTAGTCACGGULLLACTLLLTG |
| | AUCUUCUGAAGACCGGCCAC | | AUUCUCUUGGAAACUCCCAUCUUGAG |
| 190 | TCTGTACGGTGACAAGGCGULLLACTLLLTG | 1183 | TGACAAGGCGTAGTCACGGULLLACTLLLTG |
| | AUCUCCCCAACAGGCAGGUG | | AUUUGUGUGGAAGAUCCAAUCCAUUUUUG |
| 191 | TCTGTACGGTGACAAGGCGULLLACTLLLTG | 1184 | TGACAAGGCGTAGTCACGGULLLACTLLLTG |
| | AUGGGCAUGGAGUACUUGGC | | AUACAACCCACUGAGGUAUAUGUAUAGGUAU |
| | | | T |
| 192 | TCTGTACGGTGACAAGGCGULLLACTLLLTG | 1185 | TGACAAGGCGTAGTCACGGULLLACTLLLTG |
| | AUUGCAGUGUCAUGGGCAAG | | AUCAGCUCAGAAUUAACCAUAAAACUGGUG |
| 193 | TCTGTACGGTGACAAGGCGULLLACTLLLTG | 1186 | TGACAAGGCGTAGTCACGGULLLACTLLLTG |
| | AUAGGUGUCUGUCCUGGGAGT | | AUGCACACCAGAAAAGUCUUAGUAACC |
| 194 | TCTGTACGGTGACAAGGCGULLLACTLLLTG | 1187 | TGACAAGGCGTAGTCACGGULLLACTLLLTG |
| | AUUGUGCUUUUAGGGCCCACC | | AUGGUUAGUAUGUUAUCAUUUGGGAAACCAA |
| | | | AUT |
| 195 | TCTGTACGGTGACAAGGCGULLLACTLLLTG | 1188 | TGACAAGGCGTAGTCACGGULLLACTLLLTG |
| | AUCAAGCCCGCUCAUGAUCAA | | AUAAAAGAAUAUGAAAAGAUGAUUUGAGAUG |
| | | | GUG |
| 196 | TCTGTACGGTGACAAGGCGULLLACTLLLTG | 1189 | TGACAAGGCGTAGTCACGGULLLACTLLLTG |
| | AUGGGCACUGGGUCAAAGUCT | | AUGUUAUAUUGAAAAUGAUUAACAUGUAGAA |
| | | | GGGC |
| 197 | TCTGTACGGTGACAAGGCGULLLACTLLLTG | 1190 | TGACAAGGCGTAGTCACGGULLLACTLLLTG |
| | AUCUGAUGGGACCCACUCCAT | | AUACACAUGAAGCCAUCGUAUAUAUUCACA |
| 198 | TCTGTACGGTGACAAGGCGULLLACTLLLTG | 1191 | TGACAAGGCGTAGTCACGGULLLACTLLLTG |
| | AUCUCCAAAAUGGCCCGAGAC | | AUCAGACGUCACUUUCAAACGUGUAT |
| 199 | TCTGTACGGTGACAAGGCGULLLACTLLLTG | 1192 | TGACAAGGCGTAGTCACGGULLLACTLLLTG |
| | AUCAGCAGGGCUUCUUCAGCA | | AUGAUUCUUAUAAAGUGCAGCUUCUGCAT |
| 200 | TCTGTACGGTGACAAGGCGULLLACTLLLTG | 1193 | TGACAAGGCGTAGTCACGGULLLACTLLLTG |
| | AUAGCGGGACAUGGACUCAAC | | AUCUGUUUCUGGGAAACUCCCAUUT |
| 201 | TCTGTACGGTGACAAGGCGULLLACTLLLTG | 1194 | TGACAAGGCGTAGTCACGGULLLACTLLLTG |
| | AUGCAUGUACUGGUCCCGCAT | | AUUGGAGAGAGAACAAAUAAAUGGUUACCUG |
| 202 | TCTGTACGGTGACAAGGCGULLLACTLLLTG | 1195 | TGACAAGGCGTAGTCACGGULLLACTLLLTG |
| | AUCGGAAUGCCAACCCAUGGA | | AUCGGCUUUACCUCCAAUGGUG |
| 203 | TCTGTACGGTGACAAGGCGULLLACTLLLTG | 1196 | TGACAAGGCGTAGTCACGGULLLACTLLLTG |
| | AUUAGGCGAGGAGCUCCAGUC | | AUGAUCUCCCAGAGCAGGACC |
| 204 | TCTGTACGGTGACAAGGCGULLLACTLLLTG | 1197 | TGACAAGGCGTAGTCACGGULLLACTLLLTG |
| | AUGGUGAGGCUCCCCUUUCUT | | AUCUUUCUCUUCCGCACCCAG |
| 205 | TCTGTACGGTGACAAGGCGULLLACTLLLTG | 1198 | TGACAAGGCGTAGTCACGGULLLACTLLLTG |
| | AUCAGCCCUCUGACGUCCAUC | | AUUUCUAUCGGCAAAGCGGUGUT |
| 206 | TCTGTACGGTGACAAGGCGULLLACTLLLTG | 1199 | TGACAAGGCGTAGTCACGGULLLACTLLLTG |
| | AUAGGUGCCCAUCAAGUGGAT | | AUUACAGCUUCUCCCAGUAAGCAUC |
| 207 | TCTGTACGGTGACAAGGCGULLLACTLLLTG | 1200 | TGACAAGGCGTAGTCACGGULLLACTLLLTG |
| | AUCGUCCUGAAGCAGGUCAAC | | AUCUGACACCAGAUCAGAAAGGUCT |
| 208 | TCTGTACGGTGACAAGGCGULLLACTLLLTG | 1201 | TGACAAGGCGTAGTCACGGULLLACTLLLTG |
| | AUGGGUGAGGGUGUCUCUCUG | | AUUCCGGCUGCAAUGAUCAGG |
| 209 | TCTGTACGGTGACAAGGCGULLLACTLLLTG | 1202 | TGACAAGGCGTAGTCACGGULLLACTLLLTG |
| | AUAGUAAAUACGGGCCCGACG | | AUUCUCUGGGAGGGCACUG |
| 210 | TCTGTACGGTGACAAGGCGULLLACTLLLTG | 1203 | TGACAAGGCGTAGTCACGGULLLACTLLLTG |
| | AUCUUCCCCUCCAUUGUGGGC | | AUGUCUUCCCAACAAAUUUUGGGUGAAA |
| 211 | TCTGTACGGTGACAAGGCGULLLACTLLLTG | 1204 | TGACAAGGCGTAGTCACGGULLLACTLLLTG |
| | AUCCAUCCGAAAGCAGUCCAA | | AUGCACACGCGGAUGUGCA |
| 212 | TCTGTACGGTGACAAGGCGULLLACTLLLTG | 1205 | TGACAAGGCGTAGTCACGGULLLACTLLLTG |
| | AUAGGGCAGGAGUCAAGAUGC | | AUAGUCCUUGCGUGCAUUGUC |
| 213 | TCTGTACGGTGACAAGGCGULLLACTLLLTG | 1206 | TGACAAGGCGTAGTCACGGULLLACTLLLTG |
| | AUAUGGGCCCCUGGAUGGAUA | | AUAUGCUUUCAGGAGGCAUCCAG |
| 214 | TCTGTACGGTGACAAGGCGULLLACTLLLTG | 1207 | TGACAAGGCGTAGTCACGGULLLACTLLLTG |
| | AUGGUAGCAGCCGUCUGUCUC | | AUCUCUUGCGGGUACCCACG |
| 215 | TCTGTACGGTGACAAGGCGULLLACTLLLTG | 1208 | TGACAAGGCGTAGTCACGGULLLACTLLLTG |
| | AUGUACACACUGCAGCCCAAG | | AUCACAAGAACAGUGCAGAGGGUT |
| 216 | TCTGTACGGTGACAAGGCGULLLACTLLLTG | 1209 | TGACAAGGCGTAGTCACGGULLLACTLLLTG |
| | AUCUACUAUCCCUCGGGAGGC | | AUCUUUCAAUGUUGCCACCACACT |
| 217 | TCTGTACGGTGACAAGGCGULLLACTLLLTG | 1210 | TGACAAGGCGTAGTCACGGULLLACTLLLTG |
| | AUCCUUUAAGGCCCCAGCGUC | | AUCCACAUCCACCGAGGCAUT |
| 218 | TCTGTACGGTGACAAGGCGULLLACTLLLTG | 1211 | TGACAAGGCGTAGTCACGGULLLACTLLLTG |
| | AUGACCGGAUUCGCAUGUGUG | | AUGCAGGCUGGACGUACAUUCUT |
| 219 | TCTGTACGGTGACAAGGCGULLLACTLLLTG | 1212 | TGACAAGGCGTAGTCACGGULLLACTLLLTG |
| | AUGUCCAGCUCCUCUGACAGC | | AUCUCCCUCUGGAAAUCCUUCCG |
| 220 | TCTGTACGGTGACAAGGCGULLLACTLLLTG | 1213 | TGACAAGGCGTAGTCACGGULLLACTLLLTG |
| | AUGUCUCCACCCCAGCAAAAC | | AUCCCUCAGCUACCAGGAUGUUT |
| 221 | TCTGTACGGTGACAAGGCGULLLACTLLLTG | 1214 | TGACAAGGCGTAGTCACGGULLLACTLLLTG |
| | AUUCAUUCAUGCCCCUCCUGG | | AUUUCACCAGCGUCAAGUUGAUGG |
| 222 | TCTGTACGGTGACAAGGCGULLLACTLLLTG | 1215 | TGACAAGGCGTAGTCACGGULLLACTLLLTG |
| | AUCUGAAGUGCAAGGCACUGC | | AUUGGGUCUCUGUGAGGGCA |
| 223 | TCTGTACGGTGACAAGGCGULLLACTLLLTG | 1216 | TGACAAGGCGTAGTCACGGULLLACTLLLTG |
| | AUCUUCACGUGCAGCACAUGG | | AUCUGGACGUUGAUGCCACUGA |
| 224 | TCTGTACGGTGACAAGGCGULLLACTLLLTG | 1217 | TGACAAGGCGTAGTCACGGULLLACTLLLTG |
| | AUGGUUUCACGCCACCAACUT | | AUGUGAGGGCUGACGCAGAG |
| 225 | TCTGTACGGTGACAAGGCGULLLACTLLLTG | 1218 | TGACAAGGCGTAGTCACGGULLLACTLLLTG |
| | AUUCUUCUGGGCUGGGUGUGA | | AUUGUGUCCACACCUGUGUCC |
| 226 | TCTGTACGGTGACAAGGCGULLLACTLLLTG | 1219 | TGACAAGGCGTAGTCACGGULLLACTLLLTG |
| | AUACGCUGGCCUAUAAGGUGC | | AUCUAUCACAUUGUUCUCUCCAAUGCAG |
| 227 | TCTGTACGGTGACAAGGCGULLLACTLLLTG | 1220 | TGACAAGGCGTAGTCACGGULLLACTLLLTG |
| | AUCUUGACCUCCCAGACCGAG | | AUCAAUCGCGGUAGAGGCUGUC |
| 228 | TCTGTACGGTGACAAGGCGULLLACTLLLTG | 1221 | TGACAAGGCGTAGTCACGGULLLACTLLLTG |
| | AUUUGGGCAUCACUGUCCUCG | | AUCAGCGAAUGGGCAGCAUUG |
| 229 | TCTGTACGGTGACAAGGCGULLLACTLLLTG | 1222 | TGACAAGGCGTAGTCACGGULLLACTLLLTG |
| | AUAGCUUGAGCAGCAGCUGAG | | AUCGAGCCCCCUAAAGUGAAGAUC |
| 230 | TCTGTACGGTGACAAGGCGULLLACTLLLTG | 1223 | TGACAAGGCGTAGTCACGGULLLACTLLLTG |
| | AUAACAGCUCUCUGUGAUGCG | | AUGCAGUGAUGCCUACCAACUGT |
| 231 | TCTGTACGGTGACAAGGCGULLLACTLLLTG | 1224 | TGACAAGGCGTAGTCACGGULLLACTLLLTG |
| | AUACGACGGGAGGACAAUCUC | | AUGGCUAUCUCCAGGUAGUCUGGG |
| 232 | TCTGTACGGTGACAAGGCGULLLACTLLLTG | 1225 | TGACAAGGCGTAGTCACGGULLLACTLLLTG |
| | AUCGGCUGCAGGACUAUGAGG | | AUACAGCAUACAUGCAUUCCUCAG |
| 233 | TCTGTACGGTGACAAGGCGULLLACTLLLTG | 1226 | TGACAAGGCGTAGTCACGGULLLACTLLLTG |
| | AUACCUUGAGCAUCGCAUCCA | | AUCAGUGGGCAGGUCCUUCAA |
| 234 | TCTGTACGGTGACAAGGCGULLLACTLLLTG | 1227 | TGACAAGGCGTAGTCACGGULLLACTLLLTG |
| | AUGAGGGACGUGAACGGAGUG | | AUGGGUAUGGCAUAUAUCCAAGAGAAAAGAU |
| | | | UT |
| 235 | TCTGTACGGTGACAAGGCGULLLACTLLLTG | 1228 | TGACAAGGCGTAGTCACGGULLLACTLLLTG |
| | AUACACCCCCAGCUCCAGCUC | | AUAUAAAUCAGGGAGUCAGAUGGAGUGG |
| 236 | TCTGTACGGTGACAAGGCGULLLACTLLLTG | 1229 | TGACAAGGCGTAGTCACGGULLLACTLLLTG |
| | AUGCCUUUCGAGCAGUACUCC | | AUAUCUUCAUCACGUUGUCCUCGG |
| 237 | TCTGTACGGTGACAAGGCGULLLACTLLLTG | 1230 | TGACAAGGCGTAGTCACGGULLLACTLLLTG |
| | AUCACAGUACCCGGCUGUAGA | | AUGGAAAUGUUUCCUAGACAAACUCGUCA |
| 238 | TCTGTACGGTGACAAGGCGULLLACTLLLTG | 1231 | TGACAAGGCGTAGTCACGGULLLACTLLLTG |
| | AUGUGGCCAUAAAGGGCAACC | | AUCCUGCUCAGUGUAGCUAGGUT |
| 239 | TCTGTACGGTGACAAGGCGULLLACTLLLTG | 1232 | TGACAAGGCGTAGTCACGGULLLACTLLLTG |
| | AUGUCAGCCCAGACCAUUCAG | | AUCAUCGGAACCUGCACACAG |
| 240 | TCTGTACGGTGACAAGGCGULLLACTLLLTG | 1233 | TGACAAGGCGTAGTCACGGULLLACTLLLTG |
| | AUUGCUCAGGCUACAUCUCGC | | AUAAGUCCUGCCGAGCACT |
| 241 | TCTGTACGGTGACAAGGCGULLLACTLLLTG | 1234 | TGACAAGGCGTAGTCACGGULLLACTLLLTG |
| | AUCUGGACCACGGCAAAGAUG | | AUAGAUGAUGAUCUCCAGGUACAGG |
| 242 | TCTGTACGGTGACAAGGCGULLLACTLLLTG | 1235 | TGACAAGGCGTAGTCACGGULLLACTLLLTG |
| | AUCAGUGGACGUGGAUUUGGG | | AUUAUGCUAUCUGAGCCGUCUAGACT |
| 243 | TCTGTACGGTGACAAGGCGULLLACTLLLTG | 1236 | TGACAAGGCGTAGTCACGGULLLACTLLLTG |
| | AUGCAUCACAGAGCGAAGCUG | | AUAGCUGCAUGGUGCGGUT |
| 244 | TCTGTACGGTGACAAGGCGULLLACTLLLTG | 1237 | TGACAAGGCGTAGTCACGGULLLACTLLLTG |
| | AUAGUGUUGUGAUCCGCCACT | | AUCAAAGCAGCCCUCUCCCAG |
| 245 | TCTGTACGGTGACAAGGCGULLLACTLLLTG | 1238 | TGACAAGGCGTAGTCACGGULLLACTLLLTG |
| | AUUUUCUGGGACUCAUGCCCT | | AUCCAUCCUUCAUAGCUGUAUGCAC |
| 246 | TCTGTACGGTGACAAGGCGULLLACTLLLTG | 1239 | TGACAAGGCGTAGTCACGGULLLACTLLLTG |
| | AUACCGCGACGACAAGAUCUG | | AUCUCGUACGGUCAGGUUGACG |
| 247 | TCTGTACGGTGACAAGGCGULLLACTLLLTG | 1240 | TGACAAGGCGTAGTCACGGULLLACTLLLTG |
| | AUCUUCUACAGCCCAGCCCAG | | AUCAUCAUCUCCAUCUCAGACACCAG |
| 248 | TCTGTACGGTGACAAGGCGULLLACTLLLTG | 1241 | TGACAAGGCGTAGTCACGGULLLACTLLLTG |
| | AUGUGGCCAACAUUCAGCAGC | | AUUCCUCCACAGUGAGGUUAGGUG |
| 249 | TCTGTACGGTGACAAGGCGULLLACTLLLTG | 1242 | TGACAAGGCGTAGTCACGGULLLACTLLLTG |
| | AUUGGUUCUCUCCAUCGCCUT | | AUACCAUCGGUGUCAUCCUCAUCA |
| 250 | TCTGTACGGTGACAAGGCGULLLACTLLLTG | 1243 | TGACAAGGCGTAGTCACGGULLLACTLLLTG |
| | AUUCAGCUGCUUCCGUUGCUC | | AUUGUCUUCAGGCUGAUGUUGC |
| 251 | TCTGTACGGTGACAAGGCGULLLACTLLLTG | 1244 | TGACAAGGCGTAGTCACGGULLLACTLLLTG |
| | AUAUUCCGAGGCUGGAAUGGA | | AUGCCUUUUGUCCGGCUCCT |
| 252 | TCTGTACGGTGACAAGGCGULLLACTLLLTG | 1245 | TGACAAGGCGTAGTCACGGULLLACTLLLTG |
| | AUCCUCAGAAGUCCAGCAGGC | | AUCGCUCCAAAACACGACCUT |
| 253 | TCTGTACGGTGACAAGGCGULLLACTLLLTG | 1246 | TGACAAGGCGTAGTCACGGULLLACTLLLTG |
| | AUCAGGCUGUCAGAGCAGGAG | | AUGACUCGGCCCUGAGUGAUA |
| 254 | TCTGTACGGTGACAAGGCGULLLACTLLLTG | 1247 | TGACAAGGCGTAGTCACGGULLLACTLLLTG |
| | AUCUGACGAGAUCGCCAACAG | | AUCUACACUUGGCUGGGCAAAGA |
| 255 | TCTGTACGGTGACAAGGCGULLLACTLLLTG | 1248 | TGACAAGGCGTAGTCACGGULLLACTLLLTG |
| | AUCUGGAGGAAGCCAUGGAGC | | AUUGACAGGAAGACCUUGAGGUAGA |
| 256 | TCTGTACGGTGACAAGGCGULLLACTLLLTG | 1249 | TGACAAGGCGTAGTCACGGULLLACTLLLTG |
| | AUUUCUGAUGGCUUGAAGGCG | | AUAGGUCUGUCCUCAAGGAAUGGAT |
| 257 | TCTGTACGGTGACAAGGCGULLLACTLLLTG | 1250 | TGACAAGGCGTAGTCACGGULLLACTLLLTG |
| | AUAGGUGUUUGCUGACGUCCA | | AUACGGCGAUAUUUUGUCUGAUGUAGG |
| 258 | TCTGTACGGTGACAAGGCGULLLACTLLLTG | 1251 | TGACAAGGCGTAGTCACGGULLLACTLLLTG |
| | AUGUACAACCAGCCCUCCGAC | | AUUGGCCGCUCCAACUCAC |
| 259 | TCTGTACGGTGACAAGGCGULLLACTLLLTG | 1252 | TGACAAGGCGTAGTCACGGULLLACTLLLTG |
| | AUGAGCCAGAGUCCGUCAUCG | | AUCGCCCAGAGUGAAGAUCUCC |
| 260 | TCTGTACGGTGACAAGGCGULLLACTLLLTG | 1253 | TGACAAGGCGTAGTCACGGULLLACTLLLTG |
| | AUCCUGGUACCAGCUCUCCAA | | AUUUACCAAAAGGCAAAAUCCCACCA |
| 261 | TCTGTACGGTGACAAGGCGULLLACTLLLTG | 1254 | TGACAAGGCGTAGTCACGGULLLACTLLLTG |
| | AUCCACCUUACUGCCCAGGUG | | AUUCCAUUUCUGAGAUCAGGUCUGACA |
| 262 | TCTGTACGGTGACAAGGCGULLLACTLLLTG | 1255 | TGACAAGGCGTAGTCACGGULLLACTLLLTG |
| | AUCACCCGCCAGCAUCCUUAG | | AUCAUUUUGAGAUGCUUGCAAUUGCC |
| 263 | TCTGTACGGTGACAAGGCGULLLACTLLLTG | 1256 | TGACAAGGCGTAGTCACGGULLLACTLLLTG |
| | AUCUGGACUGCUCAGGGUGCC | | AUGGGUAGCAGACAAACCUGUGG |
| 264 | TCTGTACGGTGACAAGGCGULLLACTLLLTG | 1257 | TGACAAGGCGTAGTCACGGULLLACTLLLTG |
| | AUAGCCUGUCAUGAGACCUCC | | AUGUCACAUUCAGGAUGUGCUUUCG |
| 265 | TCTGTACGGTGACAAGGCGULLLACTLLLTG | 1258 | TGACAAGGCGTAGTCACGGULLLACTLLLTG |
| | AUCGCUCUUUCCAGCUGGCUA | | AUACUGCAUGCAAUUUCUUUUCCAUCT |
| 266 | TCTGTACGGTGACAAGGCGULLLACTLLLTG | 1259 | TGACAAGGCGTAGTCACGGULLLACTLLLTG |
| | AUAACGAGGUUCCGGUGUGUC | | AUUUCACUUCCAAUAUUCUCUGCUGC |
| 267 | TCTGTACGGTGACAAGGCGULLLACTLLLTG | 1260 | TGACAAGGCGTAGTCACGGULLLACTLLLTG |
| | AUGCUCCCAGGACCUCCACUA | | AUUUCUCGCUUCAGCACGAUGT |
| 268 | TCTGTACGGTGACAAGGCGULLLACTLLLTG | 1261 | TGACAAGGCGTAGTCACGGULLLACTLLLTG |
| | AUGCGACACACUGUAGGCAGT | | AUCCCAUCCUCUGGAGCCA |
| 269 | TCTGTACGGTGACAAGGCGULLLACTLLLTG | 1262 | TGACAAGGCGTAGTCACGGULLLACTLLLTG |
| | AUACCUGGGAACCUACUGUGG | | AUCCUUGUCCCUCCUUCAAGGG |
| 270 | TCTGTACGGTGACAAGGCGULLLACTLLLTG | 1263 | TGACAAGGCGTAGTCACGGULLLACTLLLTG |
| | AUCCUGAAGCUGGACUACCGC | | AUUAUAGGUCCGGUGGACAGGG |
| 271 | TCTGTACGGTGACAAGGCGULLLACTLLLTG | 1264 | TGACAAGGCGTAGTCACGGULLLACTLLLTG |
| | AUUGUGGACCUCAGCAGCAUT | | AUCUGUAGGGACACAGGGCA |
| 272 | TCTGTACGGTGACAAGGCGULLLACTLLLTG | 1265 | TGACAAGGCGTAGTCACGGULLLACTLLLTG |
| | AUCCCGUGGCUAUGCCUUCAT | | AUGUCAUAGUGGGCUUCAGCCG |
| 273 | TCTGTACGGTGACAAGGCGULLLACTLLLTG | 1266 | TGACAAGGCGTAGTCACGGULLLACTLLLTG |
| | AUACAGGGAUUCCUCUUCCCC | | AUAGUUGGUUGAACAGUUAUUUCUGCA |
| 274 | TCTGTACGGTGACAAGGCGULLLACTLLLTG | 1267 | TGACAAGGCGTAGTCACGGULLLACTLLLTG |
| | AUAUGGCACGGAACUGAACCA | | AUGAGCUGAGCGCCUGGCA |
| 275 | TCTGTACGGTGACAAGGCGULLLACTLLLTG | 1268 | TGACAAGGCGTAGTCACGGULLLACTLLLTG |
| | AUCCUGGAGAACCAGGACCUT | | AUGUCACCCCUUCCUUGGCAC |
| 276 | TCTGTACGGTGACAAGGCGULLLACTLLLTG | 1269 | TGACAAGGCGTAGTCACGGULLLACTLLLTG |
| | AUUUUGACCGCAAGCUCCUCC | | AUGAUCUUUGUGCUUACUCCUUCCUAGUT |
| 277 | TCTGTACGGTGACAAGGCGULLLACTLLLTG | 1270 | TGACAAGGCGTAGTCACGGULLLACTLLLTG |
| | AUGCCUUGCAAGCUGGUCAUT | | AUCCCCUGCUCUUCAAUACAGCC |
| 278 | TCTGTACGGTGACAAGGCGULLLACTLLLTG | 1271 | TGACAAGGCGTAGTCACGGULLLACTLLLTG |
| | AUGCUGGGACUCGUACGAGAA | | AUGUGGGCUCAGGAACCGAG |
| 279 | TCTGTACGGTGACAAGGCGULLLACTLLLTG | 1272 | TGACAAGGCGTAGTCACGGULLLACTLLLTG |
| | AUCUGGCAUGACAUGCAGACT | | AUGCUCUGGUAGAAUUGACAUAUCUCAACAC |
| 280 | TCTGTACGGTGACAAGGCGULLLACTLLLTG | 1273 | TGACAAGGCGTAGTCACGGULLLACTLLLTG |
| | AUGGCCCUUAGAGAGCUUGGG | | AUCUGAGGAUUUCCAGCAAAUAGGG |
| 281 | TCTGTACGGTGACAAGGCGULLLACTLLLTG | 1274 | TGACAAGGCGTAGTCACGGULLLACTLLLTG |
| | AUCGCAUACCCGCCAUCUUCT | | AUGAAGAUUUUCAAUCUCCUCUUGGGUUG |
| 282 | TCTGTACGGTGACAAGGCGULLLACTLLLTG | 1275 | TGACAAGGCGTAGTCACGGULLLACTLLLTG |
| | AUCUGCGGAUACAAAGGCGAC | | AUGGAUCCUUGUCCCCACCAT |
| 283 | TCTGTACGGTGACAAGGCGULLLACTLLLTG | 1276 | TGACAAGGCGTAGTCACGGULLLACTLLLTG |
| | AUAAAGCUGUGGCUGGAAACA | | AUCUCUUUGUCGGUGGUAUUAACUCC |
| 284 | TCTGTACGGTGACAAGGCGULLLACTLLLTG | 1277 | TGACAAGGCGTAGTCACGGULLLACTLLLTG |
| | AUACAUCUGCUCCGGCUUAGC | | AUCAGGUGGAGAAGUUCCUGGT |
| 285 | TCTGTACGGTGACAAGGCGULLLACTLLLTG | 1278 | TGACAAGGCGTAGTCACGGULLLACTLLLTG |
| | AUGCGACGACUUUAUCUGGGC | | AUGUACAACAGAUUAUCUCUGAAUUAGAGCG |
| | | | A |
| 286 | TCTGTACGGTGACAAGGCGULLLACTLLLTG | 1279 | TGACAAGGCGTAGTCACGGULLLACTLLLTG |
| | AUCAGUGACTGCUGCCACAAC | | AUGCAUCGUUUGUGGUUAGUGUCA |
| 287 | TCTGTACGGTGACAAGGCGULLLACTLLLTG | 1280 | TGACAAGGCGTAGTCACGGULLLACTLLLTG |
| | AUGCUGUACAUCCUGGUUGGG | | AUUUUCUGGCAUUGAUCUCGGCUT |
| 288 | TCTGTACGGTGACAAGGCGULLLACTLLLTG | 1281 | TGACAAGGCGTAGTCACGGULLLACTLLLTG |
| | AUCAAACCCAACCGUGUGACC | | AUCAGUGCUGUAUCAUCCCAAAUGUCA |
| 289 | TCTGTACGGTGACAAGGCGULLLACTLLLTG | 1282 | TGACAAGGCGTAGTCACGGULLLACTLLLTG |
| | AUGCCAAGCCUGUCACCGUAG | | AUCAACAUGCUGAUUCUUUUCAACGUUUUAU |
| | | | UUUC |
| 290 | TCTGTACGGTGACAAGGCGULLLACTLLLTG | 1283 | TGACAAGGCGTAGTCACGGULLLACTLLLTG |
| | AUUGAGUGCCACAACCUCCUG | | AUUUCUGGAUUUCAGCUUUGGAAAGT |
| 291 | TCTGTACGGTGACAAGGCGULLLACTLLLTG | 1284 | TGACAAGGCGTAGTCACGGULLLACTLLLTG |
| | AUUGAUGGCUCCCAGCUUCCT | | AUAUGUUGCACAGCCUCCUUGG |
| 292 | TCTGTACGGTGACAAGGCGULLLACTLLLTG | 1285 | TGACAAGGCGTAGTCACGGULLLACTLLLTG |
| | AUGCUGGAUCCUCACAGAGCT | | AUCUUCCCCAUCCAUUUCGGG |
| 293 | TCTGTACGGTGACAAGGCGULLLACTLLLTG | 1286 | TGACAAGGCGTAGTCACGGULLLACTLLLTG |
| | AUUGACGAAGUGAGUCCCACA | | AUACGGAGACCACUCUUCACGA |
| 294 | TCTGTACGGTGACAAGGCGULLLACTLLLTG | 1287 | TGACAAGGCGTAGTCACGGULLLACTLLLTG |
| | AUGAACGGGAAGCCCUCAUGUC | | AUGGCGAUCUCCUCGUUUGC |
| 295 | TCTGTACGGTGACAAGGCGULLLACTLLLTG | 1288 | TGACAAGGCGTAGTCACGGULLLACTLLLTG |
| | AUGGGACUCUGGAUCCCAGAAG | | AUAAUAAGGUUCACAUCAGGAAGGGT |
| 296 | TCTGTACGGTGACAAGGCGULLLACTLLLTG | 1289 | TGACAAGGCGTAGTCACGGULLLACTLLLTG |
| | AUCCCUCCUUCUGGCCACCAUG | | AUUCAGCGCGAUCAGCAUCT |
| 297 | TCTGTACGGTGACAAGGCGULLLACTLLLTG | 1290 | TGACAAGGCGTAGTCACGGULLLACTLLLTG |
| | AUUGUGCUGGACACGACAACAA | | AUGGUCUAUUCCUGUUGAAGCAGCAA |
| 298 | TCTGTACGGTGACAAGGCGULLLACTLLLTG | 1291 | TGACAAGGCGTAGTCACGGULLLACTLLLTG |
| | AUAGACCCUGAAGGAUGCCAGT | | AUUUGCAGAAGGAACACCUAUUCGUT |
| 299 | TCTGTACGGTGACAAGGCGULLLACTLLLTG | 1292 | TGACAAGGCGTAGTCACGGULLLACTLLLTG |
| | AUCGAUCGUUUGCAACCUGCUC | | AUGACCUUGGCUGCAUGAAGUUUT |
| 300 | TCTGTACGGTGACAAGGCGULLLACTLLLTG | 1293 | TGACAAGGCGTAGTCACGGULLLACTLLLTG |
| | AUUGACAGGCUAUGUCCUCGUG | | AUAAUGCUUAUUCAUGGCAGGACCA |
| 301 | TCTGTACGGTGACAAGGCGULLLACTLLLTG | 1294 | TGACAAGGCGTAGTCACGGULLLACTLLLTG |
| | AUGGCACAAGAGGCCCUAGAUT | | AUUGUUGUACACUUUGAGGAGUGAUCUG |
| 302 | TCTGTACGGTGACAAGGCGULLLACTLLLTG | 1295 | TGACAAGGCGTAGTCACGGULLLACTLLLTG |
| | AUGGGACCAGCUCUUUCGGAAC | | AUAAAGAGAUCAUUUGCCCCAUCAAUT |
| 303 | TCTGTACGGTGACAAGGCGULLLACTLLLTG | 1296 | TGACAAGGCGTAGTCACGGULLLACTLLLTG |
| | AUGGUGAAGGUGCUUGGAUCUG | | AUGGUGAACUCCUGCAUGUCAUCAG |
| 304 | TCTGTACGGTGACAAGGCGULLLACTLLLTG | 1297 | TGACAAGGCGTAGTCACGGULLLACTLLLTG |
| | AUUCUUCAGCAGGAAGUACCGT | | AUCUGGUCCAACUUCAUUUUCUGAGA |
| 305 | TCTGTACGGTGACAAGGCGULLLACTLLLTG | 1298 | TGACAAGGCGTAGTCACGGULLLACTLLLTG |
| | AUCUGAGGUGGAAGAGACAGGC | | AUACUAUCUGCAGGUUUCAUCUGAAUG |
| 306 | TCTGTACGGTGACAAGGCGULLLACTLLLTG | 1299 | TGACAAGGCGTAGTCACGGULLLACTLLLTG |
| | AUUGGAGGAGCUCUUCAAGCUG | | AUGGCCACCUGGACCUUCC |
| 307 | TCTGTACGGTGACAAGGCGULLLACTLLLTG | 1300 | TGACAAGGCGTAGTCACGGULLLACTLLLTG |
| | AUGAAGACCCAAGCUGCCUGAC | | AUUUGAGCGUGUGAAGACUGC |
| 308 | TCTGTACGGTGACAAGGCGULLLACTLLLTG | 1301 | TGACAAGGCGTAGTCACGGULLLACTLLLTG |
| | AUGGCUGUUGUGAAAAGGACGG | | AUCCCAGGUUUAUUAAAUUUCGCAGC |
| 309 | TCTGTACGGTGACAAGGCGULLLACTLLLTG | 1302 | TGACAAGGCGTAGTCACGGULLLACTLLLTG |
| | AUUGUGCUACAUACGGGCUGAA | | AUGGCCAGACUGACCCUCC |
| 310 | TCTGTACGGTGACAAGGCGULLLACTLLLTG | 1303 | TGACAAGGCGTAGTCACGGULLLACTLLLTG |
| | AUAGGCCAUUGGCUCUAUGGAA | | AUGAAUAUGUGGAAGCCCACAGC |
| 311 | TCTGTACGGTGACAAGGCGULLLACTLLLTG | 1304 | TGACAAGGCGTAGTCACGGULLLACTLLLTG |
| | AUGAGGCUAUCACAAGCUGCAC | | AUGGAGAUAUUUCACCUGACUUGAUUCAAGG |
| 312 | TCTGTACGGTGACAAGGCGULLLACTLLLTG | 1305 | TGACAAGGCGTAGTCACGGULLLACTLLLTG |
| | AUCCAUGUCUGGCUGUGAUGCT | | AUCGUUGAUGAUUUCUAACCUUUUCUGGUUT |
| 313 | TCTGTACGGTGACAAGGCGULLLACTLLLTG | 1306 | TGACAAGGCGTAGTCACGGULLLACTLLLTG |
| | AUAUGACGUACCAAACAGGCAC | | AUGCCUCCGGAAGGUCAUCT |
| 314 | TCTGTACGGTGACAAGGCGULLLACTLLLTG | 1307 | TGACAAGGCGTAGTCACGGULLLACTLLLTG |
| | AUUCCGGUUCCCACUGAUGACA | | AUCAUCUCCACCGCCGUGT |
| 315 | TCTGTACGGTGACAAGGCGULLLACTLLLTG | 1308 | TGACAAGGCGTAGTCACGGULLLACTLLLTG |
| | AUGUCAUUCAGCACCAGAGGCA | | AUGUCACAGCUGCAGUUGAAAAAGUT |
| 316 | TCTGTACGGTGACAAGGCGULLLACTLLLTG | 1309 | TGACAAGGCGTAGTCACGGULLLACTLLLTG |
| | AUGAGCUGCUCAGUUACAGCAG | | AUUUGCUCUUUUGAUUCUUUAAAUACAUCAA |
| | | | AGT |
| 317 | TCTGTACGGTGACAAGGCGULLLACTLLLTG | 1310 | TGACAAGGCGTAGTCACGGULLLACTLLLTG |
| | AUGAAAUCUCUGGCCAACUCCG | | AUGCCACUCCGCAGGAUAAAC |
| 318 | TCTGTACGGTGACAAGGCGULLLACTLLLTG | 1311 | TGACAAGGCGTAGTCACGGULLLACTLLLTG |
| | AUCCAUGCAGAAUGCCACCAAG | | AUGGUGGAAAGUAAUAGUCAAUGGGCAA |
| 319 | TCTGTACGGTGACAAGGCGULLLACTLLLTG | 1312 | TGACAAGGCGTAGTCACGGULLLACTLLLTG |
| | AUGCACUCCUUGGAGCAAAAGC | | AUUCUACAUUUGUAGGUGUGGCUGT |
| 320 | TCTGTACGGTGACAAGGCGULLLACTLLLTG | 1313 | TGACAAGGCGTAGTCACGGULLLACTLLLTG |
| | AUCUUGUUGGCCUGGCAGAAAA | | AUCGAUUCCUGGCUUUUCAUCUCUT |
| 321 | TCTGTACGGTGACAAGGCGULLLACTLLLTG | 1314 | TGACAAGGCGTAGTCACGGULLLACTLLLTG |
| | AUGAGAAGGAGAUUGCCCUGCT | | AUUCAGGGCUCUGCAGCUC |
| 322 | TCTGTACGGTGACAAGGCGULLLACTLLLTG | 1315 | TGACAAGGCGTAGTCACGGULLLACTLLLTG |
| | AUGUCACAGUUUGAGGCACAGG | | AUUAUGGAGGCCAAUGCUCUCUUCA |
| 323 | TCTGTACGGTGACAAGGCGULLLACTLLLTG | 1316 | TGACAAGGCGTAGTCACGGULLLACTLLLTG |
| | AUCCCUCUCAUUGACCGGAACC | | AUCGCUUCCUUCAGGGUCUUCAUC |
| 324 | TCTGTACGGTGACAAGGCGULLLACTLLLTG | 1317 | TGACAAGGCGTAGTCACGGULLLACTLLLTG |
| | AUCAGCUCUCAUCGGCCAAUCA | | AUGGGCUUGUCUUGAGGCUG |
| 325 | TCTGTACGGTGACAAGGCGULLLACTLLLTG | 1318 | TGACAAGGCGTAGTCACGGULLLACTLLLTG |
| | AUCCUUCUGGACCAAGACGACT | | AUUAUCUCUUCCAUAGGCUCCUGCUG |
| 326 | TCTGTACGGTGACAAGGCGULLLACTLLLTG | 1319 | TGACAAGGCGTAGTCACGGULLLACTLLLTG |
| | AUCCCCAUCCAGACCUACUCUG | | AUUACCCGAGGUCCCUGGAG |
| 327 | TCTGTACGGTGACAAGGCGULLLACTLLLTG | 1320 | TGACAAGGCGTAGTCACGGULLLACTLLLTG |
| | AUCCUGCCGCUAAAGAAGGGUC | | AUAGGCUCCAGUGCUGGUT |
| 328 | TCTGTACGGTGACAAGGCGULLLACTLLLTG | 1321 | TGACAAGGCGTAGTCACGGULLLACTLLLTG |
| | AUCUGGCAUCUCUCGCUGGUUT | | AUCCUCCCUCAGGACUGUAACAGA |
| 329 | TCTGTACGGTGACAAGGCGULLLACTLLLTG | 1322 | TGACAAGGCGTAGTCACGGULLLACTLLLTG |
| | AUUGGUGUCAUCCAGCCUUAGC | | AUUGGACUUCCAUGUGCAAACACUAC |
| 330 | TCTGTACGGTGACAAGGCGULLLACTLLLTG | 1323 | TGACAAGGCGTAGTCACGGULLLACTLLLTG |
| | AUCAUACCAGAGGCAAUCCGCA | | AUUCAUCAUCAUCAUCAUCAUCCUCCGA |
| 331 | TCTGTACGGTGACAAGGCGULLLACTLLLTG | 1324 | TGACAAGGCGTAGTCACGGULLLACTLLLTG |
| | AUCACAGCCGGAGGUCAUACUG | | AUAUUCUGAUCUGGUUGAACUAUUACUUUUC |
| | | | CA |
| 332 | TCTGTACGGTGACAAGGCGULLLACTLLLTG | 1325 | TGACAAGGCGTAGTCACGGULLLACTLLLTG |
| | AUCGGAUAGUGGAUCCCAACGG | | AUCUGACCUAGUGUGAGGGAGG |
| 333 | TCTGTACGGTGACAAGGCGULLLACTLLLTG | 1326 | TGACAAGGCGTAGTCACGGULLLACTLLLTG |
| | AUCCAGCAGAGGCAUAAGGUUC | | AUAAAUGUGUAAAUUGCCGAGCACG |
| 334 | TCTGTACGGTGACAAGGCGULLLACTLLLTG | 1327 | TGACAAGGCGTAGTCACGGULLLACTLLLTG |
| | AUGAAAACGCCUGUGUUCCACC | | AUCAUCUUCAAAGUUGCAGUAAAAACCC |
| 335 | TCTGTACGGTGACAAGGCGULLLACTLLLTG | 1328 | TGACAAGGCGTAGTCACGGULLLACTLLLTG |
| | AUUUCCGGCAAAUCACAGAUCG | | AUGAGAUAGUUUCACUUUCUUCCCAGCT |
| 336 | TCTGTACGGTGACAAGGCGULLLACTLLLTG | 1329 | TGACAAGGCGTAGTCACGGULLLACTLLLTG |
| | AUGUCUCCGGUGUGGAGUUCUG | | AUUGCCCAAAGCAACCUUCUCC |
| 337 | TCTGTACGGTGACAAGGCGULLLACTLLLTG | 1330 | TGACAAGGCGTAGTCACGGULLLACTLLLTG |
| | AUGGCAACAUUGAAAGCCUCGT | | AUGAGUCCAUUAUGAUGCUCCAGGUG |
| 338 | TCTGTACGGTGACAAGGCGULLLACTLLLTG | 1331 | TGACAAGGCGTAGTCACGGULLLACTLLLTG |
| | AUCACACAAGGGAGGUCCUCAA | | AUCCUUGUGGCUUUCAGGGUC |
| 339 | TCTGTACGGTGACAAGGCGULLLACTLLLTG | 1332 | TGACAAGGCGTAGTCACGGULLLACTLLLTG |
| | AUGGACGACGAGGAUGAGGAUG | | AUCACGACUGUUGGACCGUG |
| 340 | TCTGTACGGTGACAAGGCGULLLACTLLLTG | 1333 | TGACAAGGCGTAGTCACGGULLLACTLLLTG |
| | AUCCGAACAGAAACCCCUCCUC | | AUCCUCUUCGAACCUGUCCAUGA |
| 341 | TCTGTACGGTGACAAGGCGULLLACTLLLTG | 1334 | TGACAAGGCGTAGTCACGGULLLACTLLLTG |
| | AUUCCUGCAUCCAAUGGAUGCT | | AUUGUUGCACUGUGCCUGG |
| 342 | TCTGTACGGTGACAAGGCGULLLACTLLLTG | 1335 | TGACAAGGCGTAGTCACGGULLLACTLLLTG |
| | AUUGUCUCUUCAUGGCCAGUGC | | AUAUGAUUUGCAAAGCGCACAC |
| 343 | TCTGTACGGTGACAAGGCGULLLACTLLLTG | 1336 | TGACAAGGCGTAGTCACGGULLLACTLLLTG |
| | AUUGAUGGAGAGGCUGAAGCAG | | AUGUUUUCCUUCCUUUAUCCCAGGUG |
| 344 | TCTGTACGGTGACAAGGCGULLLACTLLLTG | 1337 | TGACAAGGCGTAGTCACGGULLLACTLLLTG |
| | AUCGAAGCCAUCAAACAGCUGC | | AUGGCAGCAGGGUGGUGAG |
| 345 | TCTGTACGGTGACAAGGCGULLLACTLLLTG | 1338 | TGACAAGGCGTAGTCACGGULLLACTLLLTG |
| | AUCCUUACAUACCCAGCACCGA | | AUAUGUCUGUGUGUCCCGUCAA |
| 346 | TCTGTACGGTGACAAGGCGULLLACTLLLTG | 1339 | TGACAAGGCGTAGTCACGGULLLACTLLLTG |
| | AUACCUUGUGUCAAUGGAGGCA | | AUCAAGCUCAGAUAUUUGGGCUUCAAG |
| 347 | TCTGTACGGTGACAAGGCGULLLACTLLLTG | 1340 | TGACAAGGCGTAGTCACGGULLLACTLLLTG |
| | AUCACAGCAUCAAGGAUGUGCA | | AUGUGAUCCUUGCCAGGUAAUCC |
| 348 | TCTGTACGGTGACAAGGCGULLLACTLLLTG | 1341 | TGACAAGGCGTAGTCACGGULLLACTLLLTG |
| | AUCCCAAUACCUGCAGCUUCUG | | AUCCGAGGGAAUUCCCACUUUG |
| 349 | TCTGTACGGTGACAAGGCGULLLACTLLLTG | 1342 | TGACAAGGCGTAGTCACGGULLLACTLLLTG |
| | AUCACUACCAGGAUUGCCAACC | | AUAGCAACCACUCGAUCCUGT |
| 350 | TCTGTACGGTGACAAGGCGULLLACTLLLTG | 1343 | TGACAAGGCGTAGTCACGGULLLACTLLLTG |
| | AUGGGAUGGAAACUUUGCUGCT | | AUCGGGAAGCGGGAGAUCUT |
| 351 | TCTGTACGGTGACAAGGCGULLLACTLLLTG | 1344 | TGACAAGGCGTAGTCACGGULLLACTLLLTG |
| | AUUGUUGGAGCCCAUUCAGAGC | | AUACAUUGGGAGCUGAUGAGGAT |
| 352 | TCTGTACGGTGACAAGGCGULLLACTLLLTG | 1345 | TGACAAGGCGTAGTCACGGULLLACTLLLTG |
| | AUUUCGCUCACCUGGAUGACAA | | AUGGUGUCUUCAUCCUCGAUGGT |
| 353 | TCTGTACGGTGACAAGGCGULLLACTLLLTG | 1346 | TGACAAGGCGTAGTCACGGULLLACTLLLTG |
| | AUAUGAGGAGUACGUGGAGGUG | | AUGUUCCUCAGAUCAUUCUCCAGCT |
| 354 | TCTGTACGGTGACAAGGCGULLLACTLLLTG | 1347 | TGACAAGGCGTAGTCACGGULLLACTLLLTG |
| | AUUCUCUCCUUGGCCUCUCCUG | | AUUGCUUGGAGUCAGCUGAGG |
| 355 | TCTGTACGGTGACAAGGCGULLLACTLLLTG | 1348 | TGACAAGGCGTAGTCACGGULLLACTLLLTG |
| | AUUGCCCAACACUGUACCUCAG | | AUAUCGCCCUUUGGUGGAAUC |
| 356 | TCTGTACGGTGACAAGGCGULLLACTLLLTG | 1349 | TGACAAGGCGTAGTCACGGULLLACTLLLTG |
| | AUCCGGGCAGGAAUCUGAUGAC | | AUGGGUCAAUCUGGAAGACAUGC |
| 357 | TCTGTACGGTGACAAGGCGULLLACTLLLTG | 1350 | TGACAAGGCGTAGTCACGGULLLACTLLLTG |
| | AUGCAGGGCAGCAACAUCUUUG | | AUACAAGGCUGUUUUGGAGAUGGA |
| 358 | TCTGTACGGTGACAAGGCGULLLACTLLLTG | 1351 | TGACAAGGCGTAGTCACGGULLLACTLLLTG |
| | AUUUCUGCAACAGCAGCACAAA | | AUACAUGUCUCCGCUGGUCG |
| 359 | TCTGTACGGTGACAAGGCGULLLACTLLLTG | 1352 | TGACAAGGCGTAGTCACGGULLLACTLLLTG |
| | AUCAGCUGCAAUUCCUCGAACG | | AUUCAUAUGGCUAUCCCUUUGCAAUUC |
| 360 | TCTGTACGGTGACAAGGCGULLLACTLLLTG | 1353 | TGACAAGGCGTAGTCACGGULLLACTLLLTG |
| | AUCGGCCUCACUAAACUGUUGG | | AUUCAGUCUCCAUGAUAGUGGUCCAG |
| 361 | TCTGTACGGTGACAAGGCGULLLACTLLLTG | 1354 | TGACAAGGCGTAGTCACGGULLLACTLLLTG |
| | AUGUGAAGGAGCUGGAGAAGCA | | AUGGAAGUCAAAUAUUUGCCUCUCCAG |
| 362 | TCTGTACGGTGACAAGGCGULLLACTLLLTG | 1355 | TGACAAGGCGTAGTCACGGULLLACTLLLTG |
| | AUCUGGAGGAAAAGGUCGCCUC | | AUUGAUGGUCGAGGUGCGG |
| 363 | TCTGTACGGTGACAAGGCGULLLACTLLLTG | 1356 | TGACAAGGCGTAGTCACGGULLLACTLLLTG |
| | AUAAUUUAGAAGGGCUGGUGGC | | AUCAAACACUGCCGAGGUGAUUUT |
| 364 | TCTGTACGGTGACAAGGCGULLLACTLLLTG | 1357 | TGACAAGGCGTAGTCACGGULLLACTLLLTG |
| | AUCCAAACCCCCUACAGAUGGC | | AUCCCAAGAAAUCGAACUCCACAAG |
| 365 | TCTGTACGGTGACAAGGCGULLLACTLLLTG | 1358 | TGACAAGGCGTAGTCACGGULLLACTLLLTG |
| | AUCACCAGUGGGAGGGUCUUAT | | AUCAUCAACUCAUGAAUUAGCUGGUUUCGA |
| 366 | TCTGTACGGTGACAAGGCGULLLACTLLLTG | 1359 | TGACAAGGCGTAGTCACGGULLLACTLLLTG |
| | AUACAUCUGCAACAGCAAGCAC | | AUGGUGCACUUCACAACAGGGT |
| 367 | TCTGTACGGTGACAAGGCGULLLACTLLLTG | 1360 | TGACAAGGCGTAGTCACGGULLLACTLLLTG |
| | AUGCCACAGCCAUCAAUGUCAC | | AUGGAAUACUCCAGCUCACAGGG |
| 368 | TCTGTACGGTGACAAGGCGULLLACTLLLTG | 1361 | TGACAAGGCGTAGTCACGGULLLACTLLLTG |
| | AUCCUGAAGACAGGCCCAACUT | | AUUUAUCCUUAAGGAGCCCUGUGUG |
| 369 | TCTGTACGGTGACAAGGCGULLLACTLLLTG | 1362 | TGACAAGGCGTAGTCACGGULLLACTLLLTG |
| | AUACGAGGCUGCAAGAGAGAUC | | AUCCCGUGCCUGUAUUCAAGUG |
| 370 | TCTGTACGGTGACAAGGCGULLLACTLLLTG | 1363 | TGACAAGGCGTAGTCACGGULLLACTLLLTG |
| | AUUGGCACCCGAGGCAUUAUUT | | AUGUGGUAUUCUGUCUUUAAUUGUAAGAUAU |
| | | | GCAA |
| 371 | TCTGTACGGTGACAAGGCGULLLACTLLLTG | 1364 | TGACAAGGCGTAGTCACGGULLLACTLLLTG |
| | AUGGAGAAUGAGUACGGCAGCA | | AUAUCUUCCACCUUAAAUUCUGGUUCUGUA |
| 372 | TCTGTACGGTGACAAGGCGULLLACTLLLTG | 1365 | TGACAAGGCGTAGTCACGGULLLACTLLLTG |
| | AUCGGACUCUCCCAUCACUCUG | | AUGGGUGUUGGAGUUCAUGGAG |
| 373 | TCTGTACGGTGACAAGGCGULLLACTLLLTG | 1366 | TGACAAGGCGTAGTCACGGULLLACTLLLTG |
| | AUGCUGCUGAAGGAAGGACACA | | AUUCUAGCUGUAGCACAAAAUCUUCGT |
| 374 | TCTGTACGGTGACAAGGCGULLLACTLLLTG | 1367 | TGACAAGGCGTAGTCACGGULLLACTLLLTG |
| | AUGGCAUGAGACUCAGUGCAGA | | AUUUUUUCCGCGGCACCUC |
| 375 | TCTGTACGGTGACAAGGCGULLLACTLLLTG | 1368 | TGACAAGGCGTAGTCACGGULLLACTLLLTG |
| | AUGAGACUCUGCUUCGCUGCAT | | AUUGGUUGAGGACUGUGAGACAGUT |
| 376 | TCTGTACGGTGACAAGGCGULLLACTLLLTG | 1369 | TGACAAGGCGTAGTCACGGULLLACTLLLTG |
| | AUCUGGAUAGCCUCCACCACCT | | AUCUCGCUGAGAUUGAACUGGAG |
| 377 | TCTGTACGGTGACAAGGCGULLLACTLLLTG | 1370 | TGACAAGGCGTAGTCACGGULLLACTLLLTG |
| | AUGUGUGAAUUAGGGACCGGGA | | AUCUGCAGGGCCAUCUUGGAG |
| 378 | TCTGTACGGTGACAAGGCGULLLACTLLLTG | 1371 | TGACAAGGCGTAGTCACGGULLLACTLLLTG |
| | AUUCCUCAAGGAGCCCUUUCCA | | AUGUCAGCCCCAGGGAUGG |
| 379 | TCTGTACGGTGACAAGGCGULLLACTLLLTG | 1372 | TGACAAGGCGTAGTCACGGULLLACTLLLTG |
| | AUAACCCCCAGUACUUCCGUCA | | AUCACAGUGAUAGGAGGUGUGGG |
| 380 | TCTGTACGGTGACAAGGCGULLLACTLLLTG | 1373 | TGACAAGGCGTAGTCACGGULLLACTLLLTG |
| | AUCGAGUGCUACAACCUCAGCC | | AUCCCAGAGCAAGGAAGUGUUAUC |
| 381 | TCTGTACGGTGACAAGGCGULLLACTLLLTG | 1374 | TGACAAGGCGTAGTCACGGULLLACTLLLTG |
| | AUCAUUCAGCCCAGAGCCUUUG | | AUGCCACGAGAGUGUGGUGAG |
| 382 | TCTGTACGGTGACAAGGCGULLLACTLLLTG | 1375 | TGACAAGGCGTAGTCACGGULLLACTLLLTG |
| | AUUACCUACUCCCUCUCCGUGA | | AUCACUCCAGCCGUCUCUUGC |
| 383 | TCTGTACGGTGACAAGGCGULLLACTLLLTG | 1376 | TGACAAGGCGTAGTCACGGULLLACTLLLTG |
| | AUCCACUGCUGUGUCUGUAAACG | | AUAAUGCACCAGUGGUGGUCT |
| 384 | TCTGTACGGTGACAAGGCGULLLACTLLLTG | 1377 | TGACAAGGCGTAGTCACGGULLLACTLLLTG |
| | AUCUCUCUGCGCAUUCAGGAGUG | | AUCCCUUCUUAAAUUGCUCCUGUAUCAUUGA |
| | | | UT |
| 385 | TCTGTACGGTGACAAGGCGULLLACTLLLTG | 1378 | TGACAAGGCGTAGTCACGGULLLACTLLLTG |
| | AUCGUACCAGAUGGAUGUGAACC | | AUUGUUCCUGUGUCAACUUAAUCAUUUGUUU |
| | | | GAUA |
| 386 | TCTGTACGGTGACAAGGCGULLLACTLLLTG | 1379 | TGACAAGGCGTAGTCACGGULLLACTLLLTG |
| | AUUGGGACCUCCGGUCAGAAAAC | | AUGCAGGAGCCAAGGUCAGUG |
| 387 | TCTGTACGGTGACAAGGCGULLLACTLLLTG | 1380 | TGACAAGGCGTAGTCACGGULLLACTLLLTG |
| | AUCCACACGCAACUGUCUAGUGG | | AUCAGCGAAUGGGCAGCAUG |
| 388 | TCTGTACGGTGACAAGGCGULLLACTLLLTG | 1381 | TGACAAGGCGTAGTCACGGULLLACTLLLTG |
| | AUCCCUACAGAUUGCGAGAGAGC | | AUUCCGCAGGCUUCCUUAGG |
| 389 | TCTGTACGGTGACAAGGCGULLLACTLLLTG | 1382 | TGACAAGGCGTAGTCACGGULLLACTLLLTG |
| | AUAUUCCUGUGCAUGAAAGCACT | | AUAUUCCGAUGUCAGCACCAAAG |
| 390 | TCTGTACGGTGACAAGGCGULLLACTLLLTG | 1383 | TGACAAGGCGTAGTCACGGULLLACTLLLTG |
| | AUUCCUCUGUCACCAGGACAUUC | | AUAGUCUUCCCCACUUCUGCCUT |
| 391 | TCTGTACGGTGACAAGGCGULLLACTLLLTG | 1384 | TGACAAGGCGTAGTCACGGULLLACTLLLTG |
| | AUGACUUGGCAGCCAGAAACAUC | | AUGCCAGAGUCAUAGCUGGAGUAACT |
| 392 | TCTGTACGGTGACAAGGCGULLLACTLLLTG | 1385 | TGACAAGGCGTAGTCACGGULLLACTLLLTG |
| | AUGACCACGUGACCUUGAAGCUC | | AUAGCAUCAAAUUUGCGCUGGAUUUC |
| 393 | TCTGTACGGTGACAAGGCGULLLACTLLLTG | 1386 | TGACAAGGCGTAGTCACGGULLLACTLLLTG |
| | AUUGGUUCUGGAUCAGCUGGAUG | | AUUCCUUCUCCAAGGCCAGAAUC |
| 394 | TCTGTACGGTGACAAGGCGULLLACTLLLTG | 1387 | TGACAAGGCGTAGTCACGGULLLACTLLLTG |
| | AUCACACUCUUGAGGGCCACAAA | | AUAGGCUCCUCCAGGCUCA |
| 395 | TCTGTACGGTGACAAGGCGULLLACTLLLTG | 1388 | TGACAAGGCGTAGTCACGGULLLACTLLLTG |
| | AUGCUCCUCAGGAGUCUCCACAT | | AUACACCUUGUCUUGAUUUUACUUUCCC |
| 396 | TCTGTACGGTGACAAGGCGULLLACTLLLTG | 1389 | TGACAAGGCGTAGTCACGGULLLACTLLLTG |
| | AUGGAUACUUACGCGCCACAGAG | | AUUGUCUGAUAUUCUUUCUCAUAUUUCUUCA |
| | | | GCT |
| 397 | TCTGTACGGTGACAAGGCGULLLACTLLLTG | 1390 | TGACAAGGCGTAGTCACGGULLLACTLLLTG |
| | AUCUUGAUGAGCAGCAGCGAAAG | | AUGCAGCAAGUCCAACUGCUAUG |
| 398 | TCTGTACGGTGACAAGGCGULLLACTLLLTG | 1391 | TGACAAGGCGTAGTCACGGULLLACTLLLTG |
| | AUGUCAAGCCCUCCAACAUCCUA | | AUUGGAAGAUCUUAACUUCCCUUUCAAGA |
| 399 | TCTGTACGGTGACAAGGCGULLLACTLLLTG | 1392 | TGACAAGGCGTAGTCACGGULLLACTLLLTG |
| | AUACUGACAACCACCCUUAACCC | | AUAGCUGAGGCCUUGCAGAAC |
| 400 | TCTGTACGGTGACAAGGCGULLLACTLLLTG | 1393 | TGACAAGGCGTAGTCACGGULLLACTLLLTG |
| | AUUACCCUCUCAGCGUACCCUUG | | AUUUUCAGCAUCUUCACGGCCA |
| 401 | TCTGTACGGTGACAAGGCGULLLACTLLLTG | 1394 | TGACAAGGCGTAGTCACGGULLLACTLLLTG |
| | AUGUUUGCUGGCUGCAAGAAGAT | | AUCUGAUCCUCAGUGGUUUGAACAGUC |
| 402 | TCTGTACGGTGACAAGGCGULLLACTLLLTG | 1395 | TGACAAGGCGTAGTCACGGULLLACTLLLTG |
| | AUGCACUCACCAUGUGUUCCAUG | | AUGCGUGACCGGGACUUCC |
| 403 | TCTGTACGGTGACAAGGCGULLLACTLLLTG | 1396 | TGACAAGGCGTAGTCACGGULLLACTLLLTG |
| | AUUCUCGUACAUGACCACACCCA | | AUCAUCAUUGCUGAUAACGGAGGC |
| 404 | TCTGTACGGTGACAAGGCGULLLACTLLLTG | 1397 | TGACAAGGCGTAGTCACGGULLLACTLLLTG |
| | AUUGUUAGUCACUGGCAGCAACA | | AUUUCUUCCCGCCUUUCCCG |
| 405 | TCTGTACGGTGACAAGGCGULLLACTLLLTG | 1398 | TGACAAGGCGTAGTCACGGULLLACTLLLTG |
| | AUGACAACGUGAUGAAGAUCGCA | | AUUCUUUGGCACAAUAUUAACUAGUCUAUUG |
| | | | UAG |
| 406 | TCTGTACGGTGACAAGGCGULLLACTLLLTG | 1399 | TGACAAGGCGTAGTCACGGULLLACTLLLTG |
| | AUCCUCUGCCUCUUCUUCUCCAG | | AUUUGCGCUUCUCCUCCUCCT |
| 407 | TCTGTACGGTGACAAGGCGULLLACTLLLTG | 1400 | TGACAAGGCGTAGTCACGGULLLACTLLLTG |
| | AUCUCUUUAGCCAUGGCAAGGUC | | AUCAUGAACCGUUCUGAGAUGAAUUAGGA |
| 408 | TCTGTACGGTGACAAGGCGULLLACTLLLTG | 1401 | TGACAAGGCGTAGTCACGGULLLACTLLLTG |
| | AUGUCCACGGAGUGUAUGACCAC | | AUAGUGAUCAGAGGUCUUGACAUAUUGG |
| 409 | TCTGTACGGTGACAAGGCGULLLACTLLLTG | 1402 | TGACAAGGCGTAGTCACGGULLLACTLLLTG |
| | AUCCUCAGUCACUGGGAGAAGAA | | AUUCCGGCAUUCGUGUUGC |
| 410 | TCTGTACGGTGACAAGGCGULLLACTLLLTG | 1403 | TGACAAGGCGTAGTCACGGULLLACTLLLTG |
| | AUCUCCGGCUUUACACCAAAAGC | | AUGACAGACUUCUCUCACACAUUGUGUC |
| 411 | TCTGTACGGTGACAAGGCGULLLACTLLLTG | 1404 | TGACAAGGCGTAGTCACGGULLLACTLLLTG |
| | AUCUUCCCUGCACUCUCAUCGCT | | AUCUGGAAGCUUUAACUUCUUUAUUAAGUUC |
| | | | UUC |
| 412 | TCTGTACGGTGACAAGGCGULLLACTLLLTG | 1405 | TGACAAGGCGTAGTCACGGULLLACTLLLTG |
| | AUAGAUCCAACCAAUGGUGGACA | | AUCACUUUGACCAAAGUCUCACUGACAA |
| 413 | TCTGTACGGTGACAAGGCGULLLACTLLLTG | 1406 | TGACAAGGCGTAGTCACGGULLLACTLLLTG |
| | AUUGUUUAAUAACCCAGCCACGG | | AUCCGUGGAGCUCCUCACAC |
| 414 | TCTGTACGGTGACAAGGCGULLLACTLLLTG | 1407 | TGACAAGGCGTAGTCACGGULLLACTLLLTG |
| | AUGAAGUCCUCUCGGAAGGUAGC | | AUGCCAAUUCACUGUGGUUUAAGUGC |
| 415 | TCTGTACGGTGACAAGGCGULLLACTLLLTG | 1408 | TGACAAGGCGTAGTCACGGULLLACTLLLTG |
| | AUUGAAGAAGCAACUGAGAGCUG | | AUUGCACGUCGGUUUUGGG |
| 416 | TCTGTACGGTGACAAGGCGULLLACTLLLTG | 1409 | TGACAAGGCGTAGTCACGGULLLACTLLLTG |
| | AUGCAGCUCCCAGAAGUUGACAG | | AUCCAGUCCCCAGGUAAUGUAAAUGUA |
| 417 | TCTGTACGGTGACAAGGCGULLLACTLLLTG | 1410 | TGACAAGGCGTAGTCACGGULLLACTLLLTG |
| | AUCUUCAGGCAUUGCUACUCUGG | | AUCUGAUCUACAGAGUUCCAAAAGUGACA |
| 418 | TCTGTACGGTGACAAGGCGULLLACTLLLTG | 1411 | TGACAAGGCGTAGTCACGGULLLACTLLLTG |
| | AUCGUAGUAGACAUCACUCGCAC | | AUACUAAUGAAUUCUUCUUCCUGCUCAG |
| 419 | TCTGTACGGTGACAAGGCGULLLACTLLLTG | 1412 | TGACAAGGCGTAGTCACGGULLLACTLLLTG |
| | AUGGCAUCUAGUCUUUCCGCUUC | | AUACUUCCUACAGGAAGCCUCCC |
| 420 | TCTGTACGGTGACAAGGCGULLLACTLLLTG | 1413 | TGACAAGGCGTAGTCACGGULLLACTLLLTG |
| | AUGUAUGGCACAAUCAGAGCUGT | | AUGUAACAAUACCAGUGAAGACCCG |
| 421 | TCTGTACGGTGACAAGGCGULLLACTLLLTG | 1414 | TGACAAGGCGTAGTCACGGULLLACTLLLTG |
| | AUUGAAGAUCAUGUGGCCUCAGT | | AUUGGCCAAGCAAUCUGCGUAUT |
| 422 | TCTGTACGGTGACAAGGCGULLLACTLLLTG | 1415 | TGACAAGGCGTAGTCACGGULLLACTLLLTG |
| | AUUUGCUUUGGAGCAGAAGAAGG | | AUCUAGGUUUCAUGCUCAUAUCCGGUC |
| 423 | TCTGTACGGTGACAAGGCGULLLACTLLLTG | 1416 | TGACAAGGCGTAGTCACGGULLLACTLLLTG |
| | AUAGUUGCAAAGACACAAGUGGG | | AUCUGCCUUGUCCCACAUCAG |
| 424 | TCTGTACGGTGACAAGGCGULLLACTLLLTG | 1417 | TGACAAGGCGTAGTCACGGULLLACTLLLTG |
| | AUUUCGGAACCUUUCUUCCCCUG | | AUUCCACGCUGCUCGGCAT |
| 425 | TCTGTACGGTGACAAGGCGULLLACTLLLTG | 1418 | TGACAAGGCGTAGTCACGGULLLACTLLLTG |
| | AUCUCAACGAAAAGAGCUACCGC | | AUCGAUGUCAUUCGCUGCAGT |
| 426 | TCTGTACGGTGACAAGGCGULLLACTLLLTG | 1419 | TGACAAGGCGTAGTCACGGULLLACTLLLTG |
| | AUACCCUGACUUCCAGAAAACCA | | AUAUGCCAGGUGCAAGCACA |
| 427 | TCTGTACGGTGACAAGGCGULLLACTLLLTG | 1420 | TGACAAGGCGTAGTCACGGULLLACTLLLTG |
| | AUAGCACUGCUCUCAGUGAGAAG | | AUGUGGAAUUGGAAUGGAUUUUGAAGGAG |
| 428 | TCTGTACGGTGACAAGGCGULLLACTLLLTG | 1421 | TGACAAGGCGTAGTCACGGULLLACTLLLTG |
| | AUGGAUUAUGGGCAUCCCAGAAG | | AUUGGGAUCUCCUUGGGUGCC |
| 429 | TCTGTACGGTGACAAGGCGULLLACTLLLTG | 1422 | TGACAAGGCGTAGTCACGGULLLACTLLLTG |
| | AUGCAAAUAUUGGGCCCUUCCUG | | AUAGAGUUUUUCCAAGAACCAAGUUCUUCC |
| 430 | TCTGTACGGTGACAAGGCGULLLACTLLLTG | 1423 | TGACAAGGCGTAGTCACGGULLLACTLLLTG |
| | AUAACUGAAGCUGUCAGGACAGA | | AUCUGCUUGGCCUGGAGGG |
| 431 | TCTGTACGGTGACAAGGCGULLLACTLLLTG | 1424 | TGACAAGGCGTAGTCACGGULLLACTLLLTG |
| | AUUGUUGGCUACCUUGGGACAUC | | AUGGGUUGUAGUCGGUCAUGAUGG |
| 432 | TCTGTACGGTGACAAGGCGULLLACTLLLTG | 1425 | TGACAAGGCGTAGTCACGGULLLACTLLLTG |
| | AUAUGCAUCUCUUGUCGCAGGUT | | AUGCCAUCUCCUCUUGCAUAAACAAGUT |
| 433 | TCTGTACGGTGACAAGGCGULLLACTLLLTG | 1426 | TGACAAGGCGTAGTCACGGULLLACTLLLTG |
| | AUGAACUGUGAGGAUGUGGCUGA | | AUGGUGGUGUUCAAAGAACUUGGA |
| 434 | TCTGTACGGTGACAAGGCGULLLACTLLLTG | 1427 | TGACAAGGCGTAGTCACGGULLLACTLLLTG |
| | AUAGUAAUCAAGCAGCAGCCAGA | | AUGAGUUGAACUGGCGGCCAT |
| 435 | TCTGTACGGTGACAAGGCGULLLACTLLLTG | 1428 | TGACAAGGCGTAGTCACGGULLLACTLLLTG |
| | AUUAUUGGGACUCCUCUGCCCUG | | AUGCUCGUGUCCCCCAACAA |
| 436 | TCTGTACGGTGACAAGGCGULLLACTLLLTG | 1429 | TGACAAGGCGTAGTCACGGULLLACTLLLTG |
| | AUCCAAGCUGGUUUUGAAGUCGC | | AUAGACUGUCUCGGACUGUAACUC |
| 437 | TCTGTACGGTGACAAGGCGULLLACTLLLTG | 1430 | TGACAAGGCGTAGTCACGGULLLACTLLLTG |
| | AUGUCAGAGAGAGCAGCUUUGUG | | AUCUCCUUCUCCGCACAUUUUACAAG |
| 438 | TCTGTACGGTGACAAGGCGULLLACTLLLTG | 1431 | TGACAAGGCGTAGTCACGGULLLACTLLLTG |
| | AUGCAUUCAGCUCCUCUGUGUUT | | AUUAAGGCAUUUCGCUCAACACUUUUC |
| 439 | TCTGTACGGTGACAAGGCGULLLACTLLLTG | 1432 | TGACAAGGCGTAGTCACGGULLLACTLLLTG |
| | AUUGUUGAAGAGAUUGGCUGGUC | | AUUGUGCUGUCCAUUUUCACUUUCUG |
| 440 | TCTGTACGGTGACAAGGCGULLLACTLLLTG | 1433 | TGACAAGGCGTAGTCACGGULLLACTLLLTG |
| | AUUACAACUGCUACCAUGAGGGC | | AUGUCUGGACGCCCGAUUCUUC |
| 441 | TCTGTACGGTGACAAGGCGULLLACTLLLTG | 1434 | TGACAAGGCGTAGTCACGGULLLACTLLLTG |
| | AUGUGUGGGAACGUGAAACAUCT | | AUGGCCCGUGUCUUGGAGG |
| 442 | TCTGTACGGTGACAAGGCGULLLACTLLLTG | 1435 | TGACAAGGCGTAGTCACGGULLLACTLLLTG |
| | AUGCUCACAUCUUCAGGUGCCUC | | AUUUCAACACAGCUGUUGGUUUCUC |
| 443 | TCTGTACGGTGACAAGGCGULLLACTLLLTG | 1436 | TGACAAGGCGTAGTCACGGULLLACTLLLTG |
| | AUCCAUCUACAAGAAAGCCCCCA | | AUUAGCAGGUCAAAAGUGAACUGAUG |
| 444 | TCTGTACGGTGACAAGGCGULLLACTLLLTG | 1437 | TGACAAGGCGTAGTCACGGULLLACTLLLTG |
| | AUCCAGGUACCACCUUAUCCACA | | AUCAUUCAUCAGCUGUGUGUUCUGAAT |
| 445 | TCTGTACGGTGACAAGGCGULLLACTLLLTG | 1438 | TGACAAGGCGTAGTCACGGULLLACTLLLTG |
| | AUUACCUGGACAAGCACAUGGAG | | AUCUCCAUCCUGAGUCAUGGCUT |
| 446 | TCTGTACGGTGACAAGGCGULLLACTLLLTG | 1439 | TGACAAGGCGTAGTCACGGULLLACTLLLTG |
| | AUACAGUCUCUUGCAAUCGGCUA | | AUGAGCUUCCCUCUGGAUCUCUCA |
| 447 | TCTGTACGGTGACAAGGCGULLLACTLLLTG | 1440 | TGACAAGGCGTAGTCACGGULLLACTLLLTG |
| | AUGCCCGGGAAUUUCUUCGAAAA | | AUCUGCUUCCUCAAGGCCGA |
| 448 | TCTGTACGGTGACAAGGCGULLLACTLLLTG | 1441 | TGACAAGGCGTAGTCACGGULLLACTLLLTG |
| | AUAACUUCAGUGGGCAUCGAGAT | | AUGUUUUUCUGGAUAAAAAGAGCCACUGUUC |
| 449 | TCTGTACGGTGACAAGGCGULLLACTLLLTG | 1442 | TGACAAGGCGTAGTCACGGULLLACTLLLTG |
| | AUUCACAGACUGUUUCCACUCCT | | AUACUGGUUGGUGGCUGGA |
| 450 | TCTGTACGGTGACAAGGCGULLLACTLLLTG | 1443 | TGACAAGGCGTAGTCACGGULLLACTLLLTG |
| | AUAGUAGAGGAUGCCGAGGAGAA | | AUCUUGAUUUCUUUUACUGACCCUUCUGC |
| 451 | TCTGTACGGTGACAAGGCGULLLACTLLLTG | 1444 | TGACAAGGCGTAGTCACGGULLLACTLLLTG |
| | AUCUCCUGUGAUCGCACUGACAC | | AUAGAUGCUGCAGAUGCUGCT |
| 452 | TCTGTACGGTGACAAGGCGULLLACTLLLTG | 1445 | TGACAAGGCGTAGTCACGGULLLACTLLLTG |
| | AUGUGCAUCCUUGGCAGAAAGUG | | AUAGCUCCAUCUGCAUGGCUT |
| 453 | TCTGTACGGTGACAAGGCGULLLACTLLLTG | 1446 | TGACAAGGCGTAGTCACGGULLLACTLLLTG |
| | AUCAACAACCUGUUGGAGCACAT | | AUCUGUUCAAGAACUUCUGAAUUUAAAACAG |
| | | | UCT |
| 454 | TCTGTACGGTGACAAGGCGULLLACTLLLTG | 1447 | TGACAAGGCGTAGTCACGGULLLACTLLLTG |
| | AUACCAGUGCAAGACUGAGACUC | | AUUAGAUAAUGCUUAAUAUUCACUUCCCCGU |
| | | | G |
| 455 | TCTGTACGGTGACAAGGCGULLLACTLLLTG | 1448 | TGACAAGGCGTAGTCACGGULLLACTLLLTG |
| | AUUCCUCCAUCAGUGACCUGAAG | | AUCAGGAGUCCGAGGUGGUG |
| 456 | TCTGTACGGTGACAAGGCGULLLACTLLLTG | 1449 | TGACAAGGCGTAGTCACGGULLLACTLLLTG |
| | AUCAGAGGCCUUCAUGGAAGGAA | | AUGUCAGCCAGGGCACCUG |
| 457 | TCTGTACGGTGACAAGGCGULLLACTLLLTG | 1450 | TGACAAGGCGTAGTCACGGULLLACTLLLTG |
| | AUGUGACUUCCACCAGGACUGUG | | AUGAUGUCCCGGCGCUUGA |
| 458 | TCTGTACGGTGACAAGGCGULLLACTLLLTG | 1451 | TGACAAGGCGTAGTCACGGULLLACTLLLTG |
| | AUGUGACCAGUGCUACGUUUCCT | | AUGUCGGGAUGGAGAAAGCGA |
| 459 | TCTGTACGGTGACAAGGCGULLLACTLLLTG | 1452 | TGACAAGGCGTAGTCACGGULLLACTLLLTG |
| | AUGCCACAUGGCGGAGAGUUUUA | | AUGGUGGCUAAUAGCUUCUUCUGUUC |
| 460 | TCTGTACGGTGACAAGGCGULLLACTLLLTG | 1453 | TGACAAGGCGTAGTCACGGULLLACTLLLTG |
| | AUUACUGUGCCACUUCAGUGUGC | | AUCCAAACUGCUCCAGGUAAUCCAC |
| 461 | TCTGTACGGTGACAAGGCGULLLACTLLLTG | 1454 | TGACAAGGCGTAGTCACGGULLLACTLLLTG |
| | AUAGUUCAGUGCCAUCAUCCUGG | | AUGCCAUGCGGGUCUCUCUG |
| 462 | TCTGTACGGTGACAAGGCGULLLACTLLLTG | 1455 | TGACAAGGCGTAGTCACGGULLLACTLLLTG |
| | AUAUCCCUUCCACAGACGUCACT | | AUCUUCGCCUAGCUCCCUUUUCA |
| 463 | TCTGTACGGTGACAAGGCGULLLACTLLLTG | 1456 | TGACAAGGCGTAGTCACGGULLLACTLLLTG |
| | AUUAACCGGAGCCUGGACCAUAG | | AUUGAUGCUUUGUUAAUGCGAAGUUCUG |
| 464 | TCTGTACGGTGACAAGGCGULLLACTLLLTG | 1457 | TGACAAGGCGTAGTCACGGULLLACTLLLTG |
| | AUAACGCUCUGGAGUCUCUCUCC | | AUUCCCAAAUUCUGCCAGGAAGC |
| 465 | TCTGTACGGTGACAAGGCGULLLACTLLLTG | 1458 | TGACAAGGCGTAGTCACGGULLLACTLLLTG |
| | AUGUAGAGCAAAUCCAUCCCCACA | | AUUCUUGAAGGCAUCCACGGAG |
| 466 | TCTGTACGGTGACAAGGCGULLLACTLLLTG | 1459 | TGACAAGGCGTAGTCACGGULLLACTLLLTG |
| | AUUCGAGCCACCAAUUUCAUAGGC | | AUCUUCUUCUCCACCGGGUCUC |
| 467 | TCTGTACGGTGACAAGGCGULLLACTLLLTG | 1460 | TGACAAGGCGTAGTCACGGULLLACTLLLTG |
| | AUCUCCCAACCAAGCUCUCUUGAG | | AUCAUCACCACGAAAUCCUUGGUCT |
| 468 | TCTGTACGGTGACAAGGCGULLLACTLLLTG | 1461 | TGACAAGGCGTAGTCACGGULLLACTLLLTG |
| | AUGUCCCCAAUGACCUGCUGAAAT | | AUCUCGUACAAGUCACAAAGUGUAUCCA |
| 469 | TCTGTACGGTGACAAGGCGULLLACTLLLTG | 1462 | TGACAAGGCGTAGTCACGGULLLACTLLLTG |
| | AUCAGAAGCAUCUCACCGAAAUCC | | AUCCAGUAGCGCUGCUUCCT |
| 470 | TCTGTACGGTGACAAGGCGULLLACTLLLTG | 1463 | TGACAAGGCGTAGTCACGGULLLACTLLLTG |
| | AUCUUCUACCAGCUCACCAAGCUC | | AUUUUUGUGAACAGUUCUUCUGGAUCAG |
| 471 | TCTGTACGGTGACAAGGCGULLLACTLLLTG | 1464 | TGACAAGGCGTAGTCACGGULLLACTLLLTG |
| | AUCACCCCCACUGAACCUCUCUUA | | AUACCUUGCUAAGAGAUAUUCAUCUGUCUUU |
| | | | UC |
| 472 | TCTGTACGGTGACAAGGCGULLLACTLLLTG | 1465 | TGACAAGGCGTAGTCACGGULLLACTLLLTG |
| | AUCCAAUCCCCACACCAAGUAUCA | | AUUCCAUACUGCUCAACCUCUGCAAUA |
| 473 | TCTGTACGGTGACAAGGCGULLLACTLLLTG | 1466 | TGACAAGGCGTAGTCACGGULLLACTLLLTG |
| | AUCGCAAUCCGGAACCAGAUCAUA | | AUCCUGGACAGCUUGUGGGAAG |
| 474 | TCTGTACGGTGACAAGGCGULLLACTLLLTG | 1467 | TGACAAGGCGTAGTCACGGULLLACTLLLTG |
| | AUGGACUAGGCGUGGGAUGUUUUT | | AUUCUCAGCUGAGGAGAUGGGT |
| 475 | TCTGTACGGTGACAAGGCGULLLACTLLLTG | 1468 | TGACAAGGCGTAGTCACGGULLLACTLLLTG |
| | AUACUCCACACGCAAAUUUCCUUC | | AUAGAGGCCCUGCACAGUUUT |
| 476 | TCTGTACGGTGACAAGGCGULLLACTLLLTG | 1469 | TGACAAGGCGTAGTCACGGULLLACTLLLTG |
| | AUCUGCAGCAAAGACUGGUUCUCA | | AUCCUUCUAGUAAUUUGGGAAUGCCUG |
| 477 | TCTGTACGGTGACAAGGCGULLLACTLLLTG | 1470 | TGACAAGGCGTAGTCACGGULLLACTLLLTG |
| | AUUGGAAUAACCAGCUGUCCUCCT | | AUUCCUCAGCUCCCGGUUCUC |
| 478 | TCTGTACGGTGACAAGGCGULLLACTLLLTG | 1471 | TGACAAGGCGTAGTCACGGULLLACTLLLTG |
| | AUAGGUAUUCUCGGAGGUUGCCUT | | AUUGACACCAACAUCUUUACUGCAGAA |
| 479 | TCTGTACGGTGACAAGGCGULLLACTLLLTG | 1472 | TGACAAGGCGTAGTCACGGULLLACTLLLTG |
| | AUCCUUCCCUCGGGAAAAACUGAC | | AUGAAGACAUGAGCUCGAGUGCT |
| 480 | TCTGTACGGTGACAAGGCGULLLACTLLLTG | 1473 | TGACAAGGCGTAGTCACGGULLLACTLLLTG |
| | AUCCCAAGCACAUGGAUCAGUGUT | | AUACCAGGAAGGACUCCACUUC |
| 481 | TCTGTACGGTGACAAGGCGULLLACTLLLTG | 1474 | TGACAAGGCGTAGTCACGGULLLACTLLLTG |
| | AUAAGUACAAUUGCAGGCUGAACG | | AUCACUGACGGAAGUUCUCAUAAACGUC |
| 482 | TCTGTACGGTGACAAGGCGULLLACTLLLTG | 1475 | TGACAAGGCGTAGTCACGGULLLACTLLLTG |
| | AUUAAGCCCACAUAUCAGGACCGA | | AUAAUCUCCCAAUCAUCACUCGAGUC |
| 483 | TCTGTACGGTGACAAGGCGULLLACTLLLTG | 1476 | TGACAAGGCGTAGTCACGGULLLACTLLLTG |
| | AUACACCUGGACACCUUGUUAGAT | | AUUUCUGGUUGAGAGAUUUGGUAUUUGGT |
| 484 | TCTGTACGGTGACAAGGCGULLLACTLLLTG | 1477 | TGACAAGGCGTAGTCACGGULLLACTLLLTG |
| | AUGUCUGGAUCUGCAGCUCUAUGG | | AUAAUAUGCUCAGACCAGUCAUCUGC |
| 485 | TCTGTACGGTGACAAGGCGULLLACTLLLTG | 1478 | TGACAAGGCGTAGTCACGGULLLACTLLLTG |
| | AUAGCUACAGAGACACAACCCAUT | | AUCAAUGCUUUUAAAUAUGUCAUUGUGGGCA |
| | | | T |
| 486 | TCTGTACGGTGACAAGGCGULLLACTLLLTG | 1479 | TGACAAGGCGTAGTCACGGULLLACTLLLTG |
| | AUAGAAUCGCAAGAGAAGCACCUT | | AUCAACAUGGCCUGGCAGC |
| 487 | TCTGTACGGTGACAAGGCGULLLACTLLLTG | 1480 | TGACAAGGCGTAGTCACGGULLLACTLLLTG |
| | AUCCGGCUCUUUCCACUAAACCAG | | AUAUCCUCUGCCCCACCCT |
| 488 | TCTGTACGGTGACAAGGCGULLLACTLLLTG | 1481 | TGACAAGGCGTAGTCACGGULLLACTLLLTG |
| | AUUGCAGUGUUUAGCAUUCUUGGG | | AUUUGUUGAGCACAAGGAGCAG |
| 489 | TCTGTACGGTGACAAGGCGULLLACTLLLTG | 1482 | TGACAAGGCGTAGTCACGGULLLACTLLLTG |
| | AUAGCAAAACUACUGUAGAGCCCA | | AUGAUCUUCAAUGGCUUUAGUCUGUUCCAA |
| 490 | TCTGTACGGTGACAAGGCGULLLACTLLLTG | 1483 | TGACAAGGCGTAGTCACGGULLLACTLLLTG |
| | AUAUCCUUUUGCUCCUGGUGGAAC | | AUCACCGUUCCACCUGAAAGACT |
| 491 | TCTGTACGGTGACAAGGCGULLLACTLLLTG | 1484 | TGACAAGGCGTAGTCACGGULLLACTLLLTG |
| | AUGACAUGUUGGAUGUGAAGGAGC | | AUAUCAGCGAGAGUGGCAGG |
| 492 | TCTGTACGGTGACAAGGCGULLLACTLLLTG | 1485 | TGACAAGGCGTAGTCACGGULLLACTLLLTG |
| | AUCUCCACCAAAGUCACCAGAGGG | | AUACCAUGCCAUAGUCCAUGCC |
| 493 | TCTGTACGGTGACAAGGCGULLLACTLLLTG | 1486 | TGACAAGGCGTAGTCACGGULLLACTLLLTG |
| | AUGUCUUAUAGCGGAAGAGGCAGA | | AUUCUGCAGAGGACUCCAGC |
| 494 | TCTGTACGGTGACAAGGCGULLLACTLLLTG | 1487 | TGACAAGGCGTAGTCACGGULLLACTLLLTG |
| | AUAGAGCCAUGGACACACUCAAGA | | AUGGGUGCUGUAUUCUGCAGGAUC |
| 495 | TCTGTACGGTGACAAGGCGULLLACTLLLTG | 1488 | TGACAAGGCGTAGTCACGGULLLACTLLLTG |
| | AUUCUCUUCUCCAUCGUCCAUGAC | | AUCAAGACCUCUCAGGUAUUGUAAGGG |
| 496 | TCTGTACGGTGACAAGGCGULLLACTLLLTG | 1489 | TGACAAGGCGTAGTCACGGULLLACTLLLTG |
| | AUGCAGAUUCCUCAUGGUCAUGGG | | AUUGAAGAUGACUUCCUUUCUCGC |
| 497 | TCTGTACGGTGACAAGGCGULLLACTLLLTG | 1490 | TGACAAGGCGTAGTCACGGULLLACTLLLTG |
| | AUUGAAGAACUAGUCCAGCUUCGA | | AUCAUCCCCCAGGAGGUCG |
| 498 | TCTGTACGGTGACAAGGCGULLLACTLLLTG | 1491 | TGACAAGGCGTAGTCACGGULLLACTLLLTG |
| | AUAACCUGCGCAAACUCUUUGUUC | | AUGCUCAGCUUGUACUCAGGGC |
| 499 | TCTGTACGGTGACAAGGCGULLLACTLLLTG | 1492 | TGACAAGGCGTAGTCACGGULLLACTLLLTG |
| | AUUCAAGUUGGUGAAAAGGCUUGG | | AUCCUUUCACGAAUUCAUUUUCUUUGCG |
| 500 | TCTGTACGGTGACAAGGCGULLLACTLLLTG | 1493 | TGACAAGGCGTAGTCACGGULLLACTLLLTG |
| | AUCAAGUUGACCCUGGGUCUGAUC | | AUGGAGCUUGCUCAGCUUGUACT |
| 501 | TCTGTACGGTGACAAGGCGULLLACTLLLTG | 1494 | TGACAAGGCGTAGTCACGGULLLACTLLLTG |
| | AUGGAGGAAAAGAGGAUGCUGGAG | | AUCUGGUUUCUGUAGAAUUCCAUGAGUAGUT |
| 502 | TCTGTACGGTGACAAGGCGULLLACTLLLTG | 1495 | TGACAAGGCGTAGTCACGGULLLACTLLLTG |
| | AUUGAACGUAAAAUGUGUCGCUCC | | AUUCUCCACUAGCACCAAGGACA |
| 503 | TCTGTACGGTGACAAGGCGULLLACTLLLTG | 1496 | TGACAAGGCGTAGTCACGGULLLACTLLLTG |
| | AUCAUGUGCUGAAAAUCCGAAGUG | | AUGCUCCUUCAGUUGAGGCUGG |
| 504 | TCTGTACGGTGACAAGGCGULLLACTLLLTG | 1497 | TGACAAGGCGTAGTCACGGULLLACTLLLTG |
| | AUCCUUAAUGCCUCAGAAACCACA | | AUCCCCCACCUGAGACUCC |
| 505 | TCTGTACGGTGACAAGGCGULLLACTLLLTG | 1498 | TGACAAGGCGTAGTCACGGULLLACTLLLTG |
| | AUACUUCUUGGCCAAGAGGAAGAC | | AUAAAAUCCAAAUCAUAUACCAAAGCAUCCA |
| 506 | TCTGTACGGTGACAAGGCGULLLACTLLLTG | 1499 | TGACAAGGCGTAGTCACGGULLLACTLLLTG |
| | AUAUUGGAGAUGGUUUCACAGCAC | | AUUAGUAAGUAUGAAACUUGUUUCUGGUAUC |
| | | | CAA |
| 507 | TCTGTACGGTGACAAGGCGULLLACTLLLTG | 1500 | TGACAAGGCGTAGTCACGGULLLACTLLLTG |
| | AUGGAAUCUCCCAGGCGGUAUUUG | | AUGAUCGUCUCCUCUGAAAUGUCAUUC |
| 508 | TCTGTACGGTGACAAGGCGULLLACTLLLTG | 1501 | TGACAAGGCGTAGTCACGGULLLACTLLLTG |
| | AUCGCACUGCCCCAAGUUUUACUA | | AUAAGAUCUAUGUCAUAAAAGCAGGGC |
| 509 | TCTGTACGGTGACAAGGCGULLLACTLLLTG | 1502 | TGACAAGGCGTAGTCACGGULLLACTLLLTG |
| | AUGAAGACGAAAACUCUGCGGAAG | | AUGGACAUCAGUGGUACUGAGCAAUA |
| 510 | TCTGTACGGTGACAAGGCGULLLACTLLLTG | 1503 | TGACAAGGCGTAGTCACGGULLLACTLLLTG |
| | AUUGAUCCUCUUCCCUCAGCUUCC | | AUGUGUCCUCCGCUGAGGC |
| 511 | TCTGTACGGTGACAAGGCGULLLACTLLLTG | 1504 | TGACAAGGCGTAGTCACGGULLLACTLLLTG |
| | AUGAGAUCACUGAUGACCUGCACT | | AUCUGAGUCCUCCUCACCACUGA |
| 512 | TCTGTACGGTGACAAGGCGULLLACTLLLTG | 1505 | TGACAAGGCGTAGTCACGGULLLACTLLLTG |
| | AUGCCUUCAAUGCACUGAUACACA | | AUCACCAGACACAGCAUCUGC |
| 513 | TCTGTACGGTGACAAGGCGULLLACTLLLTG | 1506 | TGACAAGGCGTAGTCACGGULLLACTLLLTG |
| | AUUAUGUCAGCGUUUGGCUUAACA | | AUCAUCAGGAGUCUGUUGGACCUUG |
| 514 | TCTGTACGGTGACAAGGCGULLLACTLLLTG | 1507 | TGACAAGGCGTAGTCACGGULLLACTLLLTG |
| | AUCCACCAUAUACAGGAGCUCAGA | | AUGUAGUAGUGGUUGUGGCACUUGG |
| 515 | TCTGTACGGTGACAAGGCGULLLACTLLLTG | 1508 | TGACAAGGCGTAGTCACGGULLLACTLLLTG |
| | AUUGUCUUUGGAACCACACCAGAA | | AUCCUCUUUGAGGUCUUGUCCAGUC |
| 516 | TCTGTACGGTGACAAGGCGULLLACTLLLTG | 1509 | TGACAAGGCGTAGTCACGGULLLACTLLLTG |
| | AUUUGAUAGCUGCACUGAGUGUCA | | AUACUUUUAACACUUCACCUUUAACUGCUUC |
| 517 | TCTGTACGGTGACAAGGCGULLLACTLLLTG | 1510 | TGACAAGGCGTAGTCACGGULLLACTLLLTG |
| | AUGACCUGGAUCCACAGGAAAGAA | | AUGUGGUUCGUGGCUCUCUUAUC |
| 518 | TCTGTACGGTGACAAGGCGULLLACTLLLTG | 1511 | TGACAAGGCGTAGTCACGGULLLACTLLLTG |
| | AUGGACUUGCUUCUGCACUAGACA | | AUGAGAGUGCAGUAUCAAGAAUCUUGUC |
| 519 | TCTGTACGGTGACAAGGCGULLLACTLLLTG | 1512 | TGACAAGGCGTAGTCACGGULLLACTLLLTG |
| | AUGAUGACCUGGAAGAUGGAGUCT | | AUGGGUAGGCCGUGUCUGG |
| 520 | TCTGTACGGTGACAAGGCGULLLACTLLLTG | 1513 | TGACAAGGCGTAGTCACGGULLLACTLLLTG |
| | AUAGCUGGAAGAAGCUGAAAAAGC | | AUAGGUGGCACCAAAGCTGTAUT |
| 521 | TCTGTACGGTGACAAGGCGULLLACTLLLTG | 1514 | TGACAAGGCGTAGTCACGGULLLACTLLLTG |
| | AUAGAGAGAACGGUUGCAAAACUG | | AUGCCGTCTUCCTCCATCTCAUAG |
| 522 | TCTGTACGGTGACAAGGCGULLLACTLLLTG | 1515 | TGACAAGGCGTAGTCACGGULLLACTLLLTG |
| | AUAGCUACAGUGAUGCCCACUACA | | AUGAACUCCCGCAGGUUUCCC |
| 523 | TCTGTACGGTGACAAGGCGULLLACTLLLTG | 1516 | TGACAAGGCGTAGTCACGGULLLACTLLLTG |
| | AUCCUCAAACAGAACGGUCCAGUC | | AUUUGCUUCUUUAAAUAGUUCAUGCUUUAUG |
| | | | G |
| 524 | TCTGTACGGTGACAAGGCGULLLACTLLLTG | 1517 | TGACAAGGCGTAGTCACGGULLLACTLLLTG |
| | AUGCUCAGCUAGAAGAGAAGCAGC | | AUAGGUAGCUAACCCCUACCCT |
| 525 | TCTGTACGGTGACAAGGCGULLLACTLLLTG | 1518 | TGACAAGGCGTAGTCACGGULLLACTLLLTG |
| | AUGGGAGUGAUUUGCGCCAUCAUC | | AUGGAAGAGAAAAGGAGAUUACAGCUUCC |
| 526 | TCTGTACGGTGACAAGGCGULLLACTLLLTG | 1519 | TGACAAGGCGTAGTCACGGULLLACTLLLTG |
| | AUUCCCCCUGAUAGCAGAUUUGAT | | AUCAUUGUUUUCUUAUACCCAUCAGAAGCT |
| 527 | TCTGTACGGTGACAAGGCGULLLACTLLLTG | 1520 | TGACAAGGCGTAGTCACGGULLLACTLLLTG |
| | AUAUACCAGCUGAAGAGCGACAAG | | AUACAGCACCAACCUGGAUGAG |
| 528 | TCTGTACGGTGACAAGGCGULLLACTLLLTG | 1521 | TGACAAGGCGTAGTCACGGULLLACTLLLTG |
| | AUCAAACAUUCGUCUCGGAAACCC | | AUUUCAGAUGGAAGGCCGUUG |
| 529 | TCTGTACGGTGACAAGGCGULLLACTLLLTG | 1522 | TGACAAGGCGTAGTCACGGULLLACTLLLTG |
| | AUUUGGUGAUUUUGGCAUGAGCAG | | AUCCUGUGCCUGGCAGGUAC |
| 530 | TCTGTACGGTGACAAGGCGULLLACTLLLTG | 1523 | TGACAAGGCGTAGTCACGGULLLACTLLLTG |
| | AUUCCGAGAUUGGAGCCUAACAGT | | AUACAUCGGGCCGGAGUGG |
| 531 | TCTGTACGGTGACAAGGCGULLLACTLLLTG | 1524 | TGACAAGGCGTAGTCACGGULLLACTLLLTG |
| | AUCAGCAAGAAUAUUCCCCUGGCA | | AUCAGGUGGUGACCAUCCCT |
| 532 | TCTGTACGGTGACAAGGCGULLLACTLLLTG | 1525 | TGACAAGGCGTAGTCACGGULLLACTLLLTG |
| | AUUCUCAUUUGCCUGGCAGAUCUC | | AUGACGUGGACUUUCGUAGCC |
| 533 | TCTGTACGGTGACAAGGCGULLLACTLLLTG | 1526 | TGACAAGGCGTAGTCACGGULLLACTLLLTG |
| | AUGACAUCAGCAAAGACCUGGAGA | | AUCUUCUCUGCAUGGUGCCC |
| 534 | TCTGTACGGTGACAAGGCGULLLACTLLLTG | 1527 | TGACAAGGCGTAGTCACGGULLLACTLLLTG |
| | AUAGAACUUGCUGGUGAAAAUCGG | | AUUGCAGGUAUGAGCCAGAGC |
| 535 | TCTGTACGGTGACAAGGCGULLLACTLLLTG | 1528 | TGACAAGGCGTAGTCACGGULLLACTLLLTG |
| | AUGCCUCUCUCUCUUGUCACGUAGC | | AUGGGACAAACCGCCUUAAUUCA |
| 536 | TCTGTACGGTGACAAGGCGULLLACTLLLTG | 1529 | TGACAAGGCGTAGTCACGGULLLACTLLLTG |
| | AUGGCCAUUUCUGUUUUCCUGUAGC | | AUGACGCCGAACUUCCUGC |
| 537 | TCTGTACGGTGACAAGGCGULLLACTLLLTG | 1530 | TGACAAGGCGTAGTCACGGULLLACTLLLTG |
| | AUCUUCGCCUGUCCUCAUGUAUUGG | | AUACUCCAGCGCCCUGGAC |
| 538 | TCTGTACGGTGACAAGGCGULLLACTLLLTG | 1531 | TGACAAGGCGTAGTCACGGULLLACTLLLTG |
| | AUAUCCGGGCUUUACGCAAAUAAGT | | AUGGGUGACUGGAGAGUCAGC |
| 539 | TCTGTACGGTGACAAGGCGULLLACTLLLTG | 1532 | TGACAAGGCGTAGTCACGGULLLACTLLLTG |
| | AUUGGAUUUGACCCUCCAUGAUCAG | | AUCCACGCAGGUGAUGCCC |
| 540 | TCTGTACGGTGACAAGGCGULLLACTLLLTG | 1533 | TGACAAGGCGTAGTCACGGULLLACTLLLTG |
| | AUAUCUGUACAGCAUGAAGUGCAAG | | AUCACCUGGCUCCGGUUGG |
| 541 | TCTGTACGGTGACAAGGCGULLLACTLLLTG | 1534 | TGACAAGGCGTAGTCACGGULLLACTLLLTG |
| | AUAGUCGUCAGCCUGAACAUAACAT | | AUUAUGCCGUCGGCGGCUC |
| 542 | TCTGTACGGTGACAAGGCGULLLACTLLLTG | 1535 | TGACAAGGCGTAGTCACGGULLLACTLLLTG |
| | AUUGCUUCUCAGAUGAAACCACCAG | | AUGAACGUGCGCUGCGAGT |
| 543 | TCTGTACGGTGACAAGGCGULLLACTLLLTG | 1536 | TGACAAGGCGTAGTCACGGULLLACTLLLTG |
| | AUGCUGCACCUUGACUUUAAGUGAG | | AUCAGCAGCUGUGUGACGT |
| 544 | TCTGTACGGTGACAAGGCGULLLACTLLLTG | 1537 | TGACAAGGCGTAGTCACGGULLLACTLLLTG |
| | AUCCGAGAAUGGUCAUAAAUGUGCA | | AUCCAUCUCCAUGGGCGAGA |
| 545 | TCTGTACGGTGACAAGGCGULLLACTLLLTG | 1538 | TGACAAGGCGTAGTCACGGULLLACTLLLTG |
| | AUCACUAUGGAGCUCUCACAUGUGG | | AUGCCCUGUCUUCAAGGCCA |
| 546 | TCTGTACGGTGACAAGGCGULLLACTLLLTG | 1539 | TGACAAGGCGTAGTCACGGULLLACTLLLTG |
| | AUACCCGAAGAAAGAGACUCUGGAA | | AUGAGGUGGUGGUGUUGCUUAUCT |
| 547 | TCTGTACGGTGACAAGGCGULLLACTLLLTG | 1540 | TGACAAGGCGTAGTCACGGULLLACTLLLTG |
| | AUCUCACAUUGCCCCUGACAACAUA | | AUACGCCUCCACUGAGUGC |
| 548 | TCTGTACGGTGACAAGGCGULLLACTLLLTG | 1541 | TGACAAGGCGTAGTCACGGULLLACTLLLTG |
| | AUACAGGAAGAGCACAGUCACUUUG | | AUGGCAUCGCCAACUUCGC |
| 549 | TCTGTACGGTGACAAGGCGULLLACTLLLTG | 1542 | TGACAAGGCGTAGTCACGGULLLACTLLLTG |
| | AUUCCUCAACCCUCUUCUCAUCAGG | | AUCUCCUGCACAGCGUCUC |
| 550 | TCTGTACGGTGACAAGGCGULLLACTLLLTG | 1543 | TGACAAGGCGTAGTCACGGULLLACTLLLTG |
| | AUUUCUUUGAGGUGAAGCCAAACCT | | AUGAGCUUGGCCCGCUUGC |
| 551 | TCTGTACGGTGACAAGGCGULLLACTLLLTG | 1544 | TGACAAGGCGTAGTCACGGULLLACTLLLTG |
| | AUUCCCCUACCUAGACCCUCCUAAC | | AUGCCCUCCGUGAACAUGC |
| 552 | TCTGTACGGTGACAAGGCGULLLACTLLLTG | 1545 | TGACAAGGCGTAGTCACGGULLLACTLLLTG |
| | AUGCUCCAGAAGCCCUGUUUGAUAG | | AUACCCCAGCAAGCCAUACUT |
| 553 | TCTGTACGGTGACAAGGCGULLLACTLLLTG | 1546 | TGACAAGGCGTAGTCACGGULLLACTLLLTG |
| | AUUCAUUCCUGUGUCGUCUAGCCUT | | AUAACACCGGAAAGGAUAUAUUUUCUGC |
| 554 | TCTGTACGGTGACAAGGCGULLLACTLLLTG | 1547 | TGACAAGGCGTAGTCACGGULLLACTLLLTG |
| | AUGGUUAUUAUGAGGAAGCUGUGCC | | AUCGUGGGCCUGGCACACUG |
| 555 | TCTGTACGGTGACAAGGCGULLLACTLLLTG | 1548 | TGACAAGGCGTAGTCACGGULLLACTLLLTG |
| | AUCUUUGAACUCCAAGCUGCUCAAG | | AUGGUGGUGAGCAGCAGGUT |
| 556 | TCTGTACGGTGACAAGGCGULLLACTLLLTG | 1549 | TGACAAGGCGTAGTCACGGULLLACTLLLTG |
| | AUACGUCAUGGAGUAUAUGUGUGGG | | AUCCAGGGCAUUGUGCACAAGGA |
| 557 | TCTGTACGGTGACAAGGCGULLLACTLLLTG | 1550 | TGACAAGGCGTAGTCACGGULLLACTLLLTG |
| | AUAACUACCACCUGUCCUACACCUG | | AUCAGAGGCCCCUCGGAGUG |
| 558 | TCTGTACGGTGACAAGGCGULLLACTLLLTG | 1551 | TGACAAGGCGTAGTCACGGULLLACTLLLTG |
| | AUGUUGGUAUCCCUUCAGGACUAGG | | AUAGGUGUCCAGGCCGUUG |
| 559 | TCTGTACGGTGACAAGGCGULLLACTLLLTG | 1552 | TGACAAGGCGTAGTCACGGULLLACTLLLTG |
| | AUCUCAGCAGACAAUAUCGGAUCGA | | AUGCGUAGCUCCCCUUCCC |
| 560 | TCTGTACGGTGACAAGGCGULLLACTLLLTG | 1553 | TGACAAGGCGTAGTCACGGULLLACTLLLTG |
| | AUACUUGGAGAAGCUGAGAGAAAAC | | AUCCCAACCCUACAUUUCUGCACA |
| 561 | TCTGTACGGTGACAAGGCGULLLACTLLLTG | 1554 | TGACAAGGCGTAGTCACGGULLLACTLLLTG |
| | AUUCCAGGUCAUGAAGGAGUACUUG | | AUCAGCCUCGGCCCCACUG |
| 562 | TCTGTACGGTGACAAGGCGULLLACTLLLTG | 1555 | TGACAAGGCGTAGTCACGGULLLACTLLLTG |
| | AUGACCUUCAUGAGCUGCAAUCUCA | | AUCUCCCGUGGGACAUCCT |
| 563 | TCTGTACGGTGACAAGGCGULLLACTLLLTG | 1556 | TGACAAGGCGTAGTCACGGULLLACTLLLTG |
| | AUUGUUUCAGUAUCCCUGCUCCAAA | | AUUCCUCCAAGUACGGCACC |
| 564 | TCTGTACGGTGACAAGGCGULLLACTLLLTG | 1557 | TGACAAGGCGTAGTCACGGULLLACTLLLTG |
| | AUAAGAUGUCAUCAUCAACCAAGCA | | AUCGCAGCAUGACUGUGGT |
| 565 | TCTGTACGGTGACAAGGCGULLLACTLLLTG | 1558 | TGACAAGGCGTAGTCACGGULLLACTLLLTG |
| | AUACUCCAUGUUCUUGGCCAUGCUA | | AUGGCGGCCAGCCUCACUG |
| 566 | TCTGTACGGTGACAAGGCGULLLACTLLLTG | 1559 | TGACAAGGCGTAGTCACGGULLLACTLLLTG |
| | AUGGAGCUGGUUCACAUGAUCAACT | | AUCUCAGCUGCGCCGCCUC |
| 567 | TCTGTACGGTGACAAGGCGULLLACTLLLTG | | |
| | AUAUAUUUCUUCCGCAAGUGUGUCC | | |
| 568 | TCTGTACGGTGACAAGGCGULLLACTLLLTG | | |
| | AUAAACUCGAACUGAUUUCUCCUGG | | |
| 569 | TCTGTACGGTGACAAGGCGULLLACTLLLTG | | |
| | AUGGCGCUGUCAACAGAAAGAAAAA | | |
| 570 | TCTGTACGGTGACAAGGCGULLLACTLLLTG | | |
| | AUCCAACGUUCAAGCAGUUGGUAGA | | |
| 571 | TCTGTACGGTGACAAGGCGULLLACTLLLTG | | |
| | AUUAACCAAGAGGAAGUUGGAGGUG | | |
| 572 | TCTGTACGGTGACAAGGCGULLLACTLLLTG | | |
| | AUGGUAGAGGAGGUGUUUGAUGUUC | | |
| 573 | TCTGTACGGTGACAAGGCGULLLACTLLLTG | | |
| | AUGAUCCUCCUUGCUUACCACACAC | | |
| 574 | TCTGTACGGTGACAAGGCGULLLACTLLLTG | | |
| | AUGCCCUUCGAGAGCAAGUUUAAGA | | |
| 575 | TCTGTACGGTGACAAGGCGULLLACTLLLTG | | |
| | AUCAAGUGACUCUUCAGAUCCCUGC | | |
| 576 | TCTGTACGGTGACAAGGCGULLLACTLLLTG | | |
| | AUACAUGAAAGGGAGUUUGGUUCUG | | |
| 577 | TCTGTACGGTGACAAGGCGULLLACTLLLTG | | |
| | AUUGCUAAAAGAGAGGGAGAGUGAT | | |
| 578 | TCTGTACGGTGACAAGGCGULLLACTLLLTG | | |
| | AUGGAGGAACUGGACUUCCAGAAGA | | |
| 579 | TCTGTACGGTGACAAGGCGULLLACTLLLTG | | |
| | AUUGGGAUCUUCGUAGCAUCAGUUG | | |
| 580 | TCTGTACGGTGACAAGGCGULLLACTLLLTG | | |
| | AUGCAGAACCAUCCACCAACAUAAG | | |
| 581 | TCTGTACGGTGACAAGGCGULLLACTLLLTG | | |
| | AUAGAGUUAAAUGCCCUCAAGUCGA | | |
| 582 | TCTGTACGGTGACAAGGCGULLLACTLLLTG | | |
| | AUUGGGUUUUUCCUGUGGCUGAAAA | | |
| 583 | TCTGTACGGTGACAAGGCGULLLACTLLLTG | | |
| | AUAGGACUGGGUGAAUGCUAUUGAG | | |
| 584 | TCTGTACGGTGACAAGGCGULLLACTLLLTG | | |
| | AUACCAGGGAUGAGCAGAAUGAAGA | | |
| 585 | TCTGTACGGTGACAAGGCGULLLACTLLLTG | | |
| | AUAAGACGGUCCGUAAACUGAAAAA | | |
| 586 | TCTGTACGGTGACAAGGCGULLLACTLLLTG | | |
| | AUCAGGGAUAUAUCCCCCAAAGGAT | | |
| 587 | TCTGTACGGTGACAAGGCGULLLACTLLLTG | | |
| | AUGGUUAUUAAGGAGCUUCGCAAGG | | |
| 588 | TCTGTACGGTGACAAGGCGULLLACTLLLTG | | |
| | AUGCAUGUCCAGAGAUGUCUACAGC | | |
| 589 | TCTGTACGGTGACAAGGCGULLLACTLLLTG | | |
| | AUGCCGUAUUUGAAGCCUCAGGAAC | | |
| 590 | TCTGTACGGTGACAAGGCGULLLACTLLLTG | | |
| | AUUCCAGAAGUCCAGAGCUGAGAAG | | |
| 591 | TCTGTACGGTGACAAGGCGULLLACTLLLTG | | |
| | AUCUAGACAUCUUCUCCCUCCCUUG | | |
| 592 | TCTGTACGGTGACAAGGCGULLLACTLLLTG | | |
| | AUUAUCGCAGGAGAGACUGUGAUUC | | |
| 593 | TCTGTACGGTGACAAGGCGULLLACTLLLTG | | |
| | AUCAGCAGAUGAAUCACCUUUCGUT | | |
| 594 | TCTGTACGGTGACAAGGCGULLLACTLLLTG | | |
| | AUCUGAGGAUGCUCAAAGGGUUUUT | | |
| 595 | TCTGTACGGTGACAAGGCGULLLACTLLLTG | | |
| | AUAGGCUCCUGAGACCUUUGAUAAC | | |
| 596 | TCTGTACGGTGACAAGGCGULLLACTLLLTG | | |
| | AUGGAUGAGCAAGACCUAAAUGAGC | | |
| 597 | TCTGTACGGTGACAAGGCGULLLACTLLLTG | | |
| | AUCUAUUGUAAGCAGGCGAUGUUGT | | |
| 598 | TCTGTACGGTGACAAGGCGULLLACTLLLTG | | |
| | AUCCUUAGCUGUUGAAGGAAAACGA | | |
| 599 | TCTGTACGGTGACAAGGCGULLLACTLLLTG | | |
| | AUUGAAUUUCCUGAAGAACGUUGGG | | |
| 600 | TCTGTACGGTGACAAGGCGULLLACTLLLTG | | |
| | AUUACGUGAAGGAUGACAUCUUCCG | | |
| 601 | TCTGTACGGTGACAAGGCGULLLACTLLLTG | | |
| | AUGUGCCUUUGAAAAUCAACGACAA | | |
| 602 | TCTGTACGGTGACAAGGCGULLLACTLLLTG | | |
| | AUGACCUAAAGACCAUUGCACUUCG | | |
| 603 | TCTGTACGGTGACAAGGCGULLLACTLLLTG | | |
| | AUCUUGUCAGGGAACAGGAAGAAUT | | |
| 604 | TCTGTACGGTGACAAGGCGULLLACTLLLTG | | |
| | AUAAUAAAACUUUGCUGCCACCUGT | | |
| 605 | TCTGTACGGTGACAAGGCGULLLACTLLLTG | | |
| | AUAACAACAGGAGUUGCCAUUCCAT | | |
| 606 | TCTGTACGGTGACAAGGCGULLLACTLLLTG | | |
| | AUGUGAUCCUAGUUUCUGGGCUCAA | | |
| 607 | TCTGTACGGTGACAAGGCGULLLACTLLLTG | | |
| | AUAUCAGGAAGAGGAAGAGUCCACA | | |
| 608 | TCTGTACGGTGACAAGGCGULLLACTLLLTG | | |
| | AUAAAGAGGGACUGCCAUAACAUUC | | |
| 609 | TCTGTACGGTGACAAGGCGULLLACTLLLTG | | |
| | AUACUGCCUUCUGAAAGGUGGAAUC | | |
| 610 | TCTGTACGGTGACAAGGCGULLLACTLLLTG | | |
| | AUGUGGGAAUUGACAAAGACAAGCC | | |
| 611 | TCTGTACGGTGACAAGGCGULLLACTLLLTG | | |
| | AUACAGCCCAAAGAUGAGAGUGAUT | | |
| 612 | TCTGTACGGTGACAAGGCGULLLACTLLLTG | | |
| | AUGGUUUCAGACGCUGAAGGAUUUT | | |
| 613 | TCTGTACGGTGACAAGGCGULLLACTLLLTG | | |
| | AUUGAUGUGGACUGGAUAGUCACUG | | |
| 614 | TCTGTACGGTGACAAGGCGULLLACTLLLTG | | |
| | AUGUAUCUUCUAGCUCUCUGCCUACC | | |
| 615 | TCTGTACGGTGACAAGGCGULLLACTLLLTG | | |
| | AUUGACAGCCAUCAUCAAAGAGAUCG | | |
| 616 | TCTGTACGGTGACAAGGCGULLLACTLLLTG | | |
| | AUAUUGUGAAGAUCUGUGACUUUGGC | | |
| 617 | TCTGTACGGTGACAAGGCGULLLACTLLLTG | | |
| | AUGAGCGAAUUCCUUUGGAAAACCUG | | |
| 618 | TCTGTACGGTGACAAGGCGULLLACTLLLTG | | |
| | AUUAUCCAGUGUGCCCACUACAUUGA | | |
| 619 | TCTGTACGGTGACAAGGCGULLLACTLLLTG | | |
| | AUUUCUUUUUCAGAGUGCAACCAGCA | | |
| 620 | TCTGTACGGTGACAAGGCGULLLACTLLLTG | | |
| | AUCUUGCAAGCAAAAAGUUUGUCCAC | | |
| 621 | TCTGTACGGTGACAAGGCGULLLACTLLLTG | | |
| | AUUCUGAUUUGCCAAGUUGCUCUCUT | | |
| 622 | TCTGTACGGTGACAAGGCGULLLACTLLLTG | | |
| | AUUUUUUCUGUCCACCAGGGAGUAAC | | |
| 623 | TCTGTACGGTGACAAGGCGULLLACTLLLTG | | |
| | AUGUUACUGCCAUCGACUUACAUUGG | | |
| 624 | TCTGTACGGTGACAAGGCGULLLACTLLLTG | | |
| | AUGAGAUAGUGGUGAAGGACAAUGGC | | |
| 625 | TCTGTACGGTGACAAGGCGULLLACTLLLTG | | |
| | AUGUCCUCAUGUACUGGUCCCUCAUT | | |
| 626 | TCTGTACGGTGACAAGGCGULLLACTLLLTG | | |
| | AUCUGAAUUAGCUGUAUCGUCAAGGC | | |
| 627 | TCTGTACGGTGACAAGGCGULLLACTLLLTG | | |
| | AUCGAUGCUGAGAACCAAUACCAGAC | | |
| 628 | TCTGTACGGTGACAAGGCGULLLACTLLLTG | | |
| | AUCUCUGCUGGAUCAUGUGAGACAAC | | |
| 629 | TCTGTACGGTGACAAGGCGULLLACTLLLTG | | |
| | AUCAUCUGGAUACAUGCCCAUGAACC | | |
| 630 | TCTGTACGGTGACAAGGCGULLLACTLLLTG | | |
| | AUGGAGAAUGUGAAAAUUCCAGUGGC | | |
| 631 | TCTGTACGGTGACAAGGCGULLLACTLLLTG | | |
| | AUCUGACCAUGUGGACAUUAGGUGUG | | |
| 632 | TCTGTACGGTGACAAGGCGULLLACTLLLTG | | |
| | AUCCUGAAGAAGACCUUUGACUCUGT | | |
| 633 | TCTGTACGGTGACAAGGCGULLLACTLLLTG | | |
| | AUGAGGAGGAGGAUGAGAUUCUUCCA | | |
| 634 | TCTGTACGGTGACAAGGCGULLLACTLLLTG | | |
| | AUCUCCUAGAAGACUCCAAGGGAGUA | | |
| 635 | TCTGTACGGTGACAAGGCGULLLACTLLLTG | | |
| | AUUGGACGACAUAUACCUGUGUGCUA | | |
| 636 | TCTGTACGGTGACAAGGCGULLLACTLLLTG | | |
| | AUAAUGCUACGAAGUGGGAAUGAUGA | | |
| 637 | TCTGTACGGTGACAAGGCGULLLACTLLLTG | | |
| | AUUCAGGCUACCAUUAUGGAGUCUGG | | |
| 638 | TCTGTACGGTGACAAGGCGULLLACTLLLTG | | |
| | AUUCUUACAAUGGCAGGACCAUUCUG | | |
| 639 | TCTGTACGGTGACAAGGCGULLLACTLLLTG | | |
| | AUUUGGAAGUGGUCAUUUCAGAUGUG | | |
| 640 | TCTGTACGGTGACAAGGCGULLLACTLLLTG | | |
| | AUAAGAGAUGCGCCAAUUGUAAACAA | | |
| 641 | TCTGTACGGTGACAAGGCGULLLACTLLLTG | | |
| | AUAAUUUCUCCUUCAGACAAUGCAGT | | |
| 642 | TCTGTACGGTGACAAGGCGULLLACTLLLTG | | |
| | AUGCUCUUCCAGCUUAAGAAUGAACC | | |
| 643 | TCTGTACGGTGACAAGGCGULLLACTLLLTG | | |
| | AUAUACAGAAGCUGAUGGGCCAGAUA | | |
| 644 | TCTGTACGGTGACAAGGCGULLLACTLLLTG | | |
| | AUUCAGAAUUACCAAGCUACGGAAGC | | |
| 645 | TCTGTACGGTGACAAGGCGULLLACTLLLTG | | |
| | AUUCGUUAAAGUCUCUCUUCACCCUG | | |
| 646 | TCTGTACGGTGACAAGGCGULLLACTLLLTG | | |
| | AUGCCCCAUCUAUGAGUUCAAGAUCA | | |
| 647 | TCTGTACGGTGACAAGGCGULLLACTLLLTG | | |
| | AUCCGAGUGGCGGAAAGCAAUAAAAT | | |
| 648 | TCTGTACGGTGACAAGGCGULLLACTLLLTG | | |
| | AUGGACAAAGGGUGGAUGAAAUUGAT | | |
| 649 | TCTGTACGGTGACAAGGCGULLLACTLLLTG | | |
| | AUCCAGUGAUGAUCUCAAUGGGCAAT | | |
| 650 | TCTGTACGGTGACAAGGCGULLLACTLLLTG | | |
| | AUCGAGGUGUUUUUACCACCAAGACT | | |
| 651 | TCTGTACGGTGACAAGGCGULLLACTLLLTG | | |
| | AUGUAAAUGACUGUGUCCAGCAAGUT | | |
| 652 | TCTGTACGGTGACAAGGCGULLLACTLLLTG | | |
| | AUACAGCUGCCUACAUAAAGGAAUGG | | |
| 653 | TCTGTACGGTGACAAGGCGULLLACTLLLTG | | |
| | AUGUUUGCAAGAUGAAAGGAGAAGGG | | |
| 654 | TCTGTACGGTGACAAGGCGULLLACTLLLTG | | |
| | AUACACUGGAAAGGAAGAGAUUCAUG | | |
| 655 | TCTGTACGGTGACAAGGCGULLLACTLLLTG | | |
| | AUUACUGGAGGAGAUGGUCAAGAAUC | | |
| 656 | TCTGTACGGTGACAAGGCGULLLACTLLLTG | | |
| | AUUUGUACACAUGUACAAUGCCCAAT | | |
| 657 | TCTGTACGGTGACAAGGCGULLLACTLLLTG | | |
| | AUGCACUUUUUGGAUACUUUGUGCCT | | |
| 658 | TCTGTACGGTGACAAGGCGULLLACTLLLTG | | |
| | AUCGCAAUUUAUGUUUUCCAAGCCAC | | |
| 659 | TCTGTACGGTGACAAGGCGULLLACTLLLTG | | |
| | AUGCUCCCUGGAUAUUCUUAGUAGCG | | |
| 660 | TCTGTACGGTGACAAGGCGULLLACTLLLTG | | |
| | AUAGAGCUCGAAUUCCAGAAUGAUGA | | |
| 661 | TCTGTACGGTGACAAGGCGULLLACTLLLTG | | |
| | AUCUUCAGCGAGGAAGCUACACUUUT | | |
| 662 | TCTGTACGGTGACAAGGCGULLLACTLLLTG | | |
| | AUUCAUCAAGUCCUUUGACAGUGCAT | | |
| 663 | TCTGTACGGTGACAAGGCGULLLACTLLLTG | | |
| | AUUCAGAAGUGGUUUCCUUUCUCACC | | |
| 664 | TCTGTACGGTGACAAGGCGULLLACTLLLTG | | |
| | AUAAGUUUCGGACAGUACAAAGAACG | | |
| 665 | TCTGTACGGTGACAAGGCGULLLACTLLLTG | | |
| | AUGAAGUCCAAGUUGCUUCUCAGUCT | | |
| 666 | TCTGTACGGTGACAAGGCGULLLACTLLLTG | | |
| | AUGCUUGGAGCAAGAAAAGGAAUUGC | | |
| 667 | TCTGTACGGTGACAAGGCGULLLACTLLLTG | | |
| | AUACCAAUCCAGAAAACCUUCCAUCG | | |
| 668 | TCTGTACGGTGACAAGGCGULLLACTLLLTG | | |
| | AUCAGUGUGCCAGAUACCAUUGAUGA | | |
| 669 | TCTGTACGGTGACAAGGCGULLLACTLLLTG | | |
| | AUUCAUCAUUAUUCUGGCUGGAGCAA | | |
| 670 | TCTGTACGGTGACAAGGCGULLLACTLLLTG | | |
| | AUAUGUAGGCUUUUGUUUCGUUUGUG | | |
| 671 | TCTGTACGGTGACAAGGCGULLLACTLLLTG | | |
| | AUCUGGCAACAAACAAGAUACUGGUG | | |
| 672 | TCTGTACGGTGACAAGGCGULLLACTLLLTG | | |
| | AUUCGUGGCUUUUGACAAUAUCUCCA | | |
| 673 | TCTGTACGGTGACAAGGCGULLLACTLLLTG | | |
| | AUAGAAUAACUCCUCGGUUCUAGGGC | | |
| 674 | TCTGTACGGTGACAAGGCGULLLACTLLLTG | | |
| | AUUCUCUGAGUAUGAGCUUCCCGAAG | | |
| 675 | TCTGTACGGTGACAAGGCGULLLACTLLLTG | | |
| | AUACGUCCAUCUUUUUAAGGGAUUGC | | |
| 676 | TCTGTACGGTGACAAGGCGULLLACTLLLTG | | |
| | AUGUCAUUACGUCAACGCAACGUCUA | | |
| 677 | TCTGTACGGTGACAAGGCGULLLACTLLLTG | | |
| | AUUCCACACAUAAACGGCAGUGUUAA | | |
| 678 | TCTGTACGGTGACAAGGCGULLLACTLLLTG | | |
| | AUGAGAAAAGCCUGUUUACCAAGGAG | | |
| 679 | TCTGTACGGTGACAAGGCGULLLACTLLLTG | | |
| | AUGGAGAUCUUCACCUAUGGAAAGCA | | |
| 680 | TCTGTACGGTGACAAGGCGULLLACTLLLTG | | |
| | AUCGUGUUGUGGGAGAUUUUCACCUA | | |
| 681 | TCTGTACGGTGACAAGGCGULLLACTLLLTG | | |
| | AUUGUCCUGGUCAUUUAUAGAAACCGA | | |
| 682 | TCTGTACGGTGACAAGGCGULLLACTLLLTG | | |
| | AUAGUUCGUGGGCUUGUUUUGUAUCAA | | |
| 683 | TCTGTACGGTGACAAGGCGULLLACTLLLTG | | |
| | AUGGUUGAAUGUAAGGCUUACAACGAT | | |
| 684 | TCTGTACGGTGACAAGGCGULLLACTLLLTG | | |
| | AUGUGGUUCUGGAUUAGCUGGAUUGUC | | |
| 685 | TCTGTACGGTGACAAGGCGULLLACTLLLTG | | |
| | AUAUGUGCCUCCUUCAGGAAUUCAAUC | | |
| 686 | TCTGTACGGTGACAAGGCGULLLACTLLLTG | | |
| | AUAACCAAGUUCUUUCUUUUGCACAGG | | |
| 687 | TCTGTACGGTGACAAGGCGULLLACTLLLTG | | |
| | AUGACCUCACCAUAGCUAAUCUUGGGA | | |
| 688 | TCTGTACGGTGACAAGGCGULLLACTLLLTG | | |
| | AUCCAGCACUUCUGCAUUGGAACUAUT | | |
| 689 | TCTGTACGGTGACAAGGCGULLLACTLLLTG | | |
| | AUUUGCAUUGUGUGUUUUUGACCACUG | | |
| 690 | TCTGTACGGTGACAAGGCGULLLACTLLLTG | | |
| | AUCCCUCAUUCCUUUUUCCUCUGUGUA | | |
| 691 | TCTGTACGGTGACAAGGCGULLLACTLLLTG | | |
| | AUCCCAGCCAAGUAGAAUGUGAAAGAC | | |
| 692 | TCTGTACGGTGACAAGGCGULLLACTLLLTG | | |
| | AUGUUUUUCCUCCUACUCACCAUCCUG | | |
| 693 | TCTGTACGGTGACAAGGCGULLLACTLLLTG | | |
| | AUGAGCCUGUUUUGUGUCUACUGUUCT | | |
| 694 | TCTGTACGGTGACAAGGCGULLLACTLLLTG | | |
| | AUGGACCAGAGCUUCAAGACUGUUUAG | | |
| 695 | TCTGTACGGTGACAAGGCGULLLACTLLLTG | | |
| | AUUCCUCCUCCUCUUCCCUAGAUAACT | | |
| 696 | TCTGTACGGTGACAAGGCGULLLACTLLLTG | | |
| | AUCAUCAUUCUUGAGGAGGAAGUAGCG | | |
| 697 | TCTGTACGGTGACAAGGCGULLLACTLLLTG | | |
| | AUCACUCUACCUCCAGCACAGAAUUUG | | |
| 698 | TCTGTACGGTGACAAGGCGULLLACTLLLTG | | |
| | AUCCUUAGACAACUACCUUUCUACGGA | | |
| 699 | TCTGTACGGTGACAAGGCGULLLACTLLLTG | | |
| | AUACUCCUCUUCAGAGGAGAAAGAAAC | | |
| 700 | TCTGTACGGTGACAAGGCGULLLACTLLLTG | | |
| | AUUGACUAAGAAUGGGAAGGAGUCACC | | |
| 701 | TCTGTACGGTGACAAGGCGULLLACTLLLTG | | |
| | AUUCCUGUUCCUCCCAGUUUAAGAUUT | | |
| 702 | TCTGTACGGTGACAAGGCGULLLACTLLLTG | | |
| | AUGCCAACACAAGAGAAAAUAUUUGCT | | |
| 703 | TCTGTACGGTGACAAGGCGULLLACTLLLTG | | |
| | AUCCAUCUCAUUAAUGACAAUCAGCCA | | |
| 704 | TCTGTACGGTGACAAGGCGULLLACTLLLTG | | |
| | AUAAGCAGAGGCAUCUGUAAAGUCAUG | | |
| 705 | TCTGTACGGTGACAAGGCGULLLACTLLLTG | | |
| | AUAGCAGUUGAAAAACUCCUAGAAGCC | | |
| 706 | TCTGTACGGTGACAAGGCGULLLACTLLLTG | | |
| | AUCAGCAGUACACUACCAACAGAUCAA | | |
| 707 | TCTGTACGGTGACAAGGCGULLLACTLLLTG | | |
| | AUCCUUACCAGCUUUGACAAUACAGGA | | |
| 708 | TCTGTACGGTGACAAGGCGULLLACTLLLTG | | |
| | AUGCCUCUGAGAAGUAUGUCUGAUCCA | | |
| 709 | TCTGTACGGTGACAAGGCGULLLACTLLLTG | | |
| | AUAGAAAGUACCAAUCAGAAGGACGUG | | |
| 710 | TCTGTACGGTGACAAGGCGULLLACTLLLTG | | |
| | AUAUCAGAGCCAGAAUUUUGCAGAAGA | | |
| 711 | TCTGTACGGTGACAAGGCGULLLACTLLLTG | | |
| | AUUCAACCAGAUGCAGUAUGAGUACAC | | |
| 712 | TCTGTACGGTGACAAGGCGULLLACTLLLTG | | |
| | AUUCCAAGUCUUAUGGUUCUGGAUCAA | | |
| 713 | TCTGTACGGTGACAAGGCGULLLACTLLLTG | | |
| | AUGAAGUGAAACUGUGUGAGAAGAUGG | | |
| 714 | TCTGTACGGTGACAAGGCGULLLACTLLLTG | | |
| | AUAUGUCUAACUCGGGAGACUAUGAAA | | |
| 715 | TCTGTACGGTGACAAGGCGULLLACTLLLTG | | |
| | AUGAAAAGAAACUCUUUCAUCUGCUGC | | |
| 716 | TCTGTACGGTGACAAGGCGULLLACTLLLTG | | |
| | AUCUCUGGCGUUGGUGUUUUCAAAAUA | | |
| 717 | TCTGTACGGTGACAAGGCGULLLACTLLLTG | | |
| | AUGGUGAAUAACAACUUGAGUGACGAG | | |
| 718 | TCTGTACGGTGACAAGGCGULLLACTLLLTG | | |
| | AUAAAGAUGCUGAAAUCCAGAAGCUGA | | |
| 719 | TCTGTACGGTGACAAGGCGULLLACTLLLTG | | |
| | AUGACUAGCUGCCAAGUACUUGGAUAA | | |
| 720 | TCTGTACGGTGACAAGGCGULLLACTLLLTG | | |
| | AUAUAAUGCUGUUUCCUUUACCUGGGA | | |
| 721 | TCTGTACGGTGACAAGGCGULLLACTLLLTG | | |
| | AUAGGUCAAAGAAUAUGGCCAGAAGAG | | |
| 722 | TCTGTACGGTGACAAGGCGULLLACTLLLTG | | |
| | AUGUAAACCAACAGCUCACAAAGGAGA | | |
| 723 | TCTGTACGGTGACAAGGCGULLLACTLLLTG | | |
| | AUUUGAAGAGCAUCAACAAGAAGACCA | | |
| 724 | TCTGTACGGTGACAAGGCGULLLACTLLLTG | | |
| | AUCUUGAAAUCCGCCUGAAUGAACAAG | | |
| 725 | TCTGTACGGTGACAAGGCGULLLACTLLLTG | | |
| | AUUCUUAAGGUUGAAGUGUGGUUCAGG | | |
| 726 | TCTGTACGGTGACAAGGCGULLLACTLLLTG | | |
| | AUUUUUCUUUCUCAGAAAGCAGAGGCT | | |
| 727 | TCTGTACGGTGACAAGGCGULLLACTLLLTG | | |
| | AUAGUAUCAACAUCACGGACAUCUCAA | | |
| 728 | TCTGTACGGTGACAAGGCGULLLACTLLLTG | | |
| | AUCCUCUAAAGAUCAAAACACCCCUGT | | |
| 729 | TCTGTACGGTGACAAGGCGULLLACTLLLTG | | |
| | AUUAGAACGAGUAAAUCUGUCUGCAGC | | |
| 730 | TCTGTACGGTGACAAGGCGULLLACTLLLTG | | |
| | AUUCAUCGUGAUUCAGGAGACAAUUCT | | |
| 731 | TCTGTACGGTGACAAGGCGULLLACTLLLTG | | |
| | AUAGCUGUUUCUGGUGUUAUCAGUGAC | | |
| 732 | TCTGTACGGTGACAAGGCGULLLACTLLLTG | | |
| | AUUACAUGGCACUAGAAGAACGCUUAG | | |
| 733 | TCTGTACGGTGACAAGGCGULLLACTLLLTG | | |
| | AUGCAAAGACAAAUGUGAAAUUGUGGG | | |
| 734 | TCTGTACGGTGACAAGGCGULLLACTLLLTG | | |
| | AUAACACAUUCAUUCAUAACACUGGGA | | |
| 735 | TCTGTACGGTGACAAGGCGULLLACTLLLTG | | |
| | AUCUUAAUCAGCAAGCUUUCUCUGCUG | | |
| 736 | TCTGTACGGTGACAAGGCGULLLACTLLLTG | | |
| | AUGAGAUGCAAGCAGUUAUUGAUGCAA | | |
| 737 | TCTGTACGGTGACAAGGCGULLLACTLLLTG | | |
| | AUAUAGCAAGAAGGAAGUGCCUAUCCA | | |
| 738 | TCTGTACGGTGACAAGGCGULLLACTLLLTG | | |
| | AUUCCCACAGCUAAUUUGGACCAAAAG | | |
| 739 | TCTGTACGGTGACAAGGCGULLLACTLLLTG | | |
| | AUGUUUCUUCGUCUUAUCUUUGGGACC | | |
| 740 | TCTGTACGGTGACAAGGCGULLLACTLLLTG | | |
| | AUCAGGAAGCCAGAGUUUAUUAACUGC | | |
| 741 | TCTGTACGGTGACAAGGCGULLLACTLLLTG | | |
| | AUAGAUGAGAAGAAGCACCAUGACAAT | | |
| 742 | TCTGTACGGTGACAAGGCGULLLACTLLLTG | | |
| | AUAGAGGGUAAAGUUCACAAAAGACCA | | |
| 743 | TCTGTACGGTGACAAGGCGULLLACTLLLTG | | |
| | AUGCCAAAAAUGUGCAUACUCACAGAG | | |
| 744 | TCTGTACGGTGACAAGGCGULLLACTLLLTG | | |
| | AUUGUAUCAUCUCCUGAAGCAACAUCT | | |
| 745 | TCTGTACGGTGACAAGGCGULLLACTLLLTG | | |
| | AUCCUGGAUAAUGAAAGACUCCUUCCC | | |
| 746 | TCTGTACGGTGACAAGGCGULLLACTLLLTG | | |
| | AUUCAGAUAGCAUACAAGAGACCAUGC | | |
| 747 | TCTGTACGGTGACAAGGCGULLLACTLLLTG | | |
| | AUGUGAUCUAUUUUUCCCUUUCUCCCCA | | |
| 748 | TCTGTACGGTGACAAGGCGULLLACTLLLTG | | |
| | AUAGCAAGAGGCUUUGGAGUAUUUCAUG | | |
| 749 | TCTGTACGGTGACAAGGCGULLLACTLLLTG | | |
| | AUACAAAUGCUGAAAGCUGUACCAUACC | | |
| 750 | TCTGTACGGTGACAAGGCGULLLACTLLLTG | | |
| | AUACUAGGUGAAUACUGUUCGAGAGGUT | | |
| 751 | TCTGTACGGTGACAAGGCGULLLACTLLLTG | | |
| | AUCUCCAUGCCUUUGAGAACCUAGAAAT | | |
| 752 | TCTGTACGGTGACAAGGCGULLLACTLLLTG | | |
| | AUUUCAAAAGGAAGUAUCUUGGCCUCCA | | |
| 753 | TCTGTACGGTGACAAGGCGULLLACTLLLTG | | |
| | AUCAAUCAUGUUGCAGCAAUUCACUGUA | | |
| 754 | TCTGTACGGTGACAAGGCGULLLACTLLLTG | | |
| | AUCACUUUACCCUGUAAUAAUCCGUGCT | | |
| 755 | TCTGTACGGTGACAAGGCGULLLACTLLLTG | | |
| | AUCAGUGAUGAGAGUGACAUGUACUGUT | | |
| 756 | TCTGTACGGTGACAAGGCGULLLACTLLLTG | | |
| | AUGAGUCCCAACCAUGUCAAAAUUACAG | | |
| 757 | TCTGTACGGTGACAAGGCGULLLACTLLLTG | | |
| | AUAUUGCCAACAUGACUUACUUGAUCCC | | |
| 758 | TCTGTACGGTGACAAGGCGULLLACTLLLTG | | |
| | AUUUACCCUCUUCAGCUCAGUUUCUUUC | | |
| 759 | TCTGTACGGTGACAAGGCGULLLACTLLLTG | | |
| | AUGGUGAGAUCCAUUGACCUCAAUUUUG | | |
| 760 | TCTGTACGGTGACAAGGCGULLLACTLLLTG | | |
| | AUGGUGGACCCCAAGCUUUAGUAAAUAT | | |
| 761 | TCTGTACGGTGACAAGGCGULLLACTLLLTG | | |
| | AUAAAUACCCCCUCCAUCAACUUCUUCA | | |
| 762 | TCTGTACGGTGACAAGGCGULLLACTLLLTG | | |
| | AUAUUAGAGAACUACCCUGGAAUGACCC | | |
| 763 | TCTGTACGGTGACAAGGCGULLLACTLLLTG | | |
| | AUCCUUGCUUACCUGAGGAACUUAUUCA | | |
| 764 | TCTGTACGGTGACAAGGCGULLLACTLLLTG | | |
| | AUCCACAUUACAUACUUACCAUGCCACT | | |
| 765 | TCTGTACGGTGACAAGGCGULLLACTLLLTG | | |
| | AUGGGAAGCUGUCCAUCAGUAUACAUUC | | |
| 766 | TCTGTACGGTGACAAGGCGULLLACTLLLTG | | |
| | AUCAUUAUUGUGGCCUGUUUGACUCUGT | | |
| 767 | TCTGTACGGTGACAAGGCGULLLACTLLLTG | | |
| | AUUGACUCUUUACUUCAAACUCUGAGCC | | |
| 768 | TCTGTACGGTGACAAGGCGULLLACTLLLTG | | |
| | AUGUCGUCUUCGGAAAUGUUAUGAAGCA | | |
| 769 | TCTGTACGGTGACAAGGCGULLLACTLLLTG | | |
| | AUGAGAGAGUACUGAAUUCUUGCAGCAG | | |
| 770 | TCTGTACGGTGACAAGGCGULLLACTLLLTG | | |
| | AUACUUCAAAAUCAAGUUUGCUGAGACT | | |
| 771 | TCTGTACGGTGACAAGGCGULLLACTLLLTG | | |
| | AUGCAAUUCACUAACAAGAAAACAGGGA | | |
| 772 | TCTGTACGGTGACAAGGCGULLLACTLLLTG | | |
| | AUAAAUACACAGACAAACUCCAGAAAGC | | |
| 773 | TCTGTACGGTGACAAGGCGULLLACTLLLTG | | |
| | AUCUACUGUUUGCUCCUAACUUGCUCUT | | |
| 774 | TCTGTACGGTGACAAGGCGULLLACTLLLTG | | |
| | AUCAGAGAGGAAAGUCCCUUAUUGAUUG | | |
| 775 | TCTGTACGGTGACAAGGCGULLLACTLLLTG | | |
| | AUUGAGUGUGGUGGAGUUCAGUUUCUAT | | |
| 776 | TCTGTACGGTGACAAGGCGULLLACTLLLTG | | |
| | AUAAGACCUUGCAGAAAUAGGAAUUGCT | | |
| 777 | TCTGTACGGTGACAAGGCGULLLACTLLLTG | | |
| | AUGAAGAAAAUGAAAAGGAGUUAGCAGC | | |
| 778 | TCTGTACGGTGACAAGGCGULLLACTLLLTG | | |
| | AUGAGUAACACAUCUUCUCAACCAGGAC | | |
| 779 | TCTGTACGGTGACAAGGCGULLLACTLLLTG | | |
| | AUUGGAUUUUUCUUACCACAACAUGACA | | |
| 780 | TCTGTACGGTGACAAGGCGULLLACTLLLTG | | |
| | AUAUUUCAGUUUGCUGAAGUCAAGGAGG | | |
| 781 | TCTGTACGGTGACAAGGCGULLLACTLLLTG | | |
| | AUGGAUUUCUUCUGAUGGUAGCUUUUGT | | |
| 782 | TCTGTACGGTGACAAGGCGULLLACTLLLTG | | |
| | AUCAGUCUACAAAAAGACCUGCUAGAGC | | |
| 783 | TCTGTACGGTGACAAGGCGULLLACTLLLTG | | |
| | AUGUGUGGAUGAAACUUUGAUGUGUUCA | | |
| 784 | TCTGTACGGTGACAAGGCGULLLACTLLLTG | | |
| | AUAGAAUUAUGGACCAGACUCAGUGCCT | | |
| 785 | TCTGTACGGTGACAAGGCGULLLACTLLLTG | | |
| | AUCGGGAGGAAUUCAUCAUAUUCAACAG | | |
| 786 | TCTGTACGGTGACAAGGCGULLLACTLLLTG | | |
| | AUAAAAAGACAUGGAUGAAAGACGACGA | | |
| 787 | TCTGTACGGTGACAAGGCGULLLACTLLLTG | | |
| | AUAGUAGGACUGUAGACAGUGAAACUUG | | |
| 788 | TCTGTACGGTGACAAGGCGULLLACTLLLTG | | |
| | AUCUAUUGGGAUAUCCUUUCACUCUGCA | | |
| 789 | TCTGTACGGTGACAAGGCGULLLACTLLLTG | | |
| | AUAUGAUCGGGAAACACAAAAACAUCAT | | |
| 790 | TCTGTACGGTGACAAGGCGULLLACTLLLTG | | |
| | AUUUCCUAGCUGAAUGCUAUAACCUCUG | | |
| 791 | TCTGTACGGTGACAAGGCGULLLACTLLLTG | | |
| | AUAUCCAAGCAAUUCUAUGCUAUACACAC | | |
| 792 | TCTGTACGGTGACAAGGCGULLLACTLLLTG | | |
| | AUCACAAAGAUUUGUGAUUUUGGUCUAGC | | |
| 793 | TCTGTACGGTGACAAGGCGULLLACTLLLTG | | |
| | AUCUGACCAACUUUUCCCAGUUUCUCAAT | | |
| 794 | TCTGTACGGTGACAAGGCGULLLACTLLLTG | | |
| | AUACCUUUCCUCUGGAGUAUCUACAUGAA | | |
| 795 | TCTGTACGGTGACAAGGCGULLLACTLLLTG | | |
| | AUCACUGUUGUUUCACAAGAUGAUGUUUG | | |
| 796 | TCTGTACGGTGACAAGGCGULLLACTLLLTG | | |
| | AUGUUUGACAGUUAAAGGCAUUUCCUGUG | | |
| 797 | TCTGTACGGTGACAAGGCGULLLACTLLLTG | | |
| | AUACCUUCGGCUUUUUCAACCCUUUUUAA | | |
| 798 | TCTGTACGGTGACAAGGCGULLLACTLLLTG | | |
| | AUGGAAACAACAUUCAACUCCCUACUUUG | | |
| 799 | TCTGTACGGTGACAAGGCGULLLACTLLLTG | | |
| | AUAAAUCAUCAACAUCAACAUUGCAGACT | | |
| 800 | TCTGTACGGTGACAAGGCGULLLACTLLLTG | | |
| | AUGAUGGCUGAUCUUGAAGGUUUACACUT | | |
| 801 | TCTGTACGGTGACAAGGCGULLLACTLLLTG | | |
| | AUCAAGUAUUACAAUAGAGCUGGGAUGGA | | |
| 802 | TCTGTACGGTGACAAGGCGULLLACTLLLTG | | |
| | AUGGAGGAUCCUGUAAUUAUUGAAAGAGC | | |
| 803 | TCTGTACGGTGACAAGGCGULLLACTLLLTG | | |
| | AUUAGAAGACUUGACUGGUCUUACAUUGC | | |
| 804 | TCTGTACGGTGACAAGGCGULLLACTLLLTG | | |
| | AUAGGAAGAAGCAGAUCAGAUACGAAAAA | | |
| 805 | TCTGTACGGTGACAAGGCGULLLACTLLLTG | | |
| | AUCACAGUAAAGAGAUUGUGGCUAUCAGC | | |
| 806 | TCTGTACGGTGACAAGGCGULLLACTLLLTG | | |
| | AUCGUAUACAAAGGAAACUCAGACUCCAG | | |
| 807 | TCTGTACGGTGACAAGGCGULLLACTLLLTG | | |
| | AUAAUGAAUCAUUUGGAGGUGGAUUUGCT | | |
| 808 | TCTGTACGGTGACAAGGCGULLLACTLLLTG | | |
| | AUGUUCCACUUGUCAGUGAAGUUCAAAUA | | |
| 809 | TCTGTACGGTGACAAGGCGULLLACTLLLTG | | |
| | AUGAAGACUUGGAUCGAAUUCUCACUCUC | | |
| 810 | TCTGTACGGTGACAAGGCGULLLACTLLLTG | | |
| | AUAAAGGGAUCUUCCAGUAUGACUACCAT | | |
| 811 | TCTGTACGGTGACAAGGCGULLLACTLLLTG | | |
| | AUGUAACGAAACAGACAGUCUUACAGAAG | | |
| 812 | TCTGTACGGTGACAAGGCGULLLACTLLLTG | | |
| | AUUUGAAACACUCAGAAAAACAGUUGAGG | | |
| 813 | TCTGTACGGTGACAAGGCGULLLACTLLLTG | | |
| | AUCUAGAGGAAGAGUUAAGAAAGGCCAAC | | |
| 814 | TCTGTACGGTGACAAGGCGULLLACTLLLTG | | |
| | AUGCAGAACAGGAUAUAACUACCUUGGAG | | |
| 815 | TCTGTACGGTGACAAGGCGULLLACTLLLTG | | |
| | AUGACAGUGAGAGACUUCAGUAUGAAAAA | | |
| 816 | TCTGTACGGTGACAAGGCGULLLACTLLLTG | | |
| | AUGAAUUAUGAGACCUACUGAUGUCCCUG | | |
| 817 | TCTGTACGGTGACAAGGCGULLLACTLLLTG | | |
| | AUAUUCCUCAGGGAAUACUUUGAGAGGUT | | |
| 818 | TCTGTACGGTGACAAGGCGULLLACTLLLTG | | |
| | AUCUUUGCAAGCUGAUAAUGAUUUCACCA | | |
| 819 | TCTGTACGGTGACAAGGCGULLLACTLLLTG | | |
| | AUGUUGCUCCAGCACUAAGUGUAUUUAAT | | |
| 820 | TCTGTACGGTGACAAGGCGULLLACTLLLTG | | |
| | AUCCUCACUUUCAAUAUCACGAAGACCAT | | |
| 821 | TCTGTACGGTGACAAGGCGULLLACTLLLTG | | |
| | AUGAAGAAACCACUGGAUGGAGAAUAUUT | | |
| 822 | TCTGTACGGTGACAAGGCGULLLACTLLLTG | | |
| | AUAGAUCGGUAGCCAAGCUGGAAAAGACA | | |
| 823 | TCTGTACGGTGACAAGGCGULLLACTLLLTG | | |
| | AUUGGUUACUAGUUUAGAAGAAUCCCUGA | | |
| 824 | TCTGTACGGTGACAAGGCGULLLACTLLLTG | | |
| | AUCAGUUAUCCAAGUUCCCAACACAGAUC | | |
| 825 | TCTGTACGGTGACAAGGCGULLLACTLLLTG | | |
| | AUUGUGGAAAAAGAUUUAGCAGGCUAGAC | | |
| 826 | TCTGTACGGTGACAAGGCGULLLACTLLLTG | | |
| | AUAAGAAUGAAUCUGGCACAUGGAUUCAG | | |
| 827 | TCTGTACGGTGACAAGGCGULLLACTLLLTG | | |
| | AUGCCGUGAUAGAAAAUAUACAGCGAGAA | | |
| 828 | TCTGTACGGTGACAAGGCGULLLACTLLLTG | | |
| | AUUGUGGCUCAUAAAGCAUUUCUGAAAAA | | |
| 829 | TCTGTACGGTGACAAGGCGULLLACTLLLTG | | |
| | AUGAGUAGCUCCAAAUUAAUGAAUGUGCAT | | |
| 830 | TCTGTACGGTGACAAGGCGULLLACTLLLTG | | |
| | AUUCUCAUGUCUGAACUGAAGAUAAUGACT | | |
| 831 | TCTGTACGGTGACAAGGCGULLLACTLLLTG | | |
| | AUUACCCAAAUUGCUUCUGUCUGUUAAAUG | | |
| 832 | TCTGTACGGTGACAAGGCGULLLACTLLLTG | | |
| | AUUAAAUGGUUUUCUUUUCUCCUCCAACCT | | |
| 833 | TCTGTACGGTGACAAGGCGULLLACTLLLTG | | |
| | AUAUAGUGAUUAGUAAAGGAGCCCAAGAAT | | |
| 834 | TCTGTACGGTGACAAGGCGULLLACTLLLTG | | |
| | AUAAUUAACUUACUUGCCACUGAAAAGUUG | | |
| 835 | TCTGTACGGTGACAAGGCGULLLACTLLLTG | | |
| | AUUCCUUCCUAGAGAGUUAGAGUAACUUCA | | |
| 836 | TCTGTACGGTGACAAGGCGULLLACTLLLTG | | |
| | AUAUCCCUUUGGGUUAUAAAUAGUGCACUC | | |
| 837 | TCTGTACGGTGACAAGGCGULLLACTLLLTG | | |
| | AUAUCUUGACAAAGCAAAUAAAGACAAAGC | | |
| 838 | TCTGTACGGTGACAAGGCGULLLACTLLLTG | | |
| | AUUUAAGGGAAAAUGACAAAGAACAGCUCA | | |
| 839 | TCTGTACGGTGACAAGGCGULLLACTLLLTG | | |
| | AUGGGAAGAAAAGUGUUUUGAAAUGUGUUT | | |
| 840 | TCTGTACGGTGACAAGGCGULLLACTLLLTG | | |
| | AUUAAAUCUUUUCUCAAUGAUGCUUGGCUC | | |
| 841 | TCTGTACGGTGACAAGGCGULLLACTLLLTG | | |
| | AUAAGGAACUGUGUGCAAAAUCUUCAAUUG | | |
| 842 | TCTGTACGGTGACAAGGCGULLLACTLLLTG | | |
| | AUCAAGAAUAAAAUGUCUAGCAGCAAGAAG | | |
| 843 | TCTGTACGGTGACAAGGCGULLLACTLLLTG | | |
| | AUAGAUCAGAUCUGGACUAUAUUAGGUCCC | | |
| 844 | TCTGTACGGTGACAAGGCGULLLACTLLLTG | | |
| | AUGGAACAGAUAUCCAGAACUAGUGAACUT | | |
| 845 | TCTGTACGGTGACAAGGCGULLLACTLLLTG | | |
| | AUGGUGAAGAACUUAAAACUGUGACAGAGA | | |
| 846 | TCTGTACGGTGACAAGGCGULLLACTLLLTG | | |
| | AUCCUGAAAACCAAAUACGAUGAAGAAACT | | |
| 847 | TCTGTACGGTGACAAGGCGULLLACTLLLTG | | |
| | AUAUGUUGACAACUAUGAUGACAUCAGAAC | | |
| 848 | TCTGTACGGTGACAAGGCGULLLACTLLLTG | | |
| | AUCAUGAAGACUUCCUAGAGAAUUCACAUC | | |
| 849 | TCTGTACGGTGACAAGGCGULLLACTLLLTG | | |
| | AUAUAAAGGACAAGGUAAGAAGAAGACAAG | | |
| 850 | TCTGTACGGTGACAAGGCGULLLACTLLLTG | | |
| | AUGAACUGGAGAAGAUGAUGACUAUGUUGA | | |
| 851 | TCTGTACGGTGACAAGGCGULLLACTLLLTG | | |
| | AUACCUGUGAAGAAAAUGUGUGUUGAUUUT | | |
| 852 | TCTGTACGGTGACAAGGCGULLLACTLLLTG | | |
| | AUCUCAACAAACAGGACUAAGGAAAGGAAA | | |
| 853 | TCTGTACGGTGACAAGGCGULLLACTLLLTG | | |
| | AUUCUACUCAGCUGAAAAGCAGAGUUAAAA | | |
| 854 | TCTGTACGGTGACAAGGCGULLLACTLLLTG | | |
| | AUAGGUUCUCACCCAUAUAUUGAUUUUCGT | | |
| 855 | TCTGTACGGTGACAAGGCGULLLACTLLLTG | | |
| | AUCAGAAAAUGAAGAGUUUGUUGAAGUGGG | | |
| 856 | TCTGTACGGTGACAAGGCGULLLACTLLLTG | | |
| | AUCCAGUUCCUAGCAGAUUUAAUAGACGAG | | |
| 857 | TCTGTACGGTGACAAGGCGULLLACTLLLTG | | |
| | AUGGGAAUUGGCUAUUCUUUACAACUGUAC | | |
| 858 | TCTGTACGGTGACAAGGCGULLLACTLLLTG | | |
| | AUGGAUUUCAAAGUGUUACCUCAAGAAGCA | | |
| 859 | TCTGTACGGTGACAAGGCGULLLACTLLLTG | | |
| | AUGGACAGAAUUGAAUCAGGGAGAUAUGAA | | |
| 860 | TCTGTACGGTGACAAGGCGULLLACTLLLTG | | |
| | AUCAUAUAGUGAUCAGAGAUUAAGGCCAAG | | |
| 861 | TCTGTACGGTGACAAGGCGULLLACTLLLTG | | |
| | AUACAUAAAAUUCACAGGAAAUCAGAUCCA | | |
| 862 | TCTGTACGGTGACAAGGCGULLLACTLLLTG | | |
| | AUCUUUUCAGGAGGUGUAAAACAAGAAAAA | | |
| 863 | TCTGTACGGTGACAAGGCGULLLACTLLLTG | | |
| | AUUUGAAAAAUGGCAAAGAAUUCAAACCUG | | |
| 864 | TCTGTACGGTGACAAGGCGULLLACTLLLTG | | |
| | AUUCUGUUCAAUUUUGUUGAGCUUCUGAAUT | | |
| 865 | TCTGTACGGTGACAAGGCGULLLACTLLLTG | | |
| | AUUGAUCGGGAAGCAUAAGAAUAUCAUCAAC | | |
| 866 | TCTGTACGGTGACAAGGCGULLLACTLLLTG | | |
| | AUUUAUUUAUUGGUCUCUCAUUCUCCCAUCC | | |
| 867 | TCTGTACGGTGACAAGGCGULLLACTLLLTG | | |
| | AUCCCAAGUACAUAUCCUGUAAGACCAGAAT | | |
| 868 | TCTGTACGGTGACAAGGCGULLLACTLLLTG | | |
| | AUGGAGCCUAAUCUUUCAUUAUUACUGGGAA | | |
| 869 | TCTGTACGGTGACAAGGCGULLLACTLLLTG | | |
| | AUAACGGGUUAUUAACAUAUUUCAGAGCAAC | | |
| 870 | TCTGTACGGTGACAAGGCGULLLACTLLLTG | | |
| | AUCAAAGCAGGGAUUUCAUUCAUCAUUAAGA | | |
| 871 | TCTGTACGGTGACAAGGCGULLLACTLLLTG | | |
| | AUCCUGUAAAUACGAAUCUUUCCAAAGGAGA | | |
| 872 | TCTGTACGGTGACAAGGCGULLLACTLLLTG | | |
| | AUUUGAAAGCGUUUGAGAAUCUUUUAGGACA | | |
| 873 | TCTGTACGGTGACAAGGCGULLLACTLLLTG | | |
| | AUAAGUUGAAGAUUUACCACUGAAACUGACA | | |
| 874 | TCTGTACGGTGACAAGGCGULLLACTLLLTG | | |
| | AUCCUUUUUGGAAACAUACAGGAUAUCUACC | | |
| 875 | TCTGTACGGTGACAAGGCGULLLACTLLLTG | | |
| | AUACCAAUACUUCAGAAGACAAAUGUGAAAA | | |
| 876 | TCTGTACGGTGACAAGGCGULLLACTLLLTG | | |
| | AUGAUUGAAGAAGCAUACAUGACAAAAUGUG | | |
| 877 | TCTGTACGGTGACAAGGCGULLLACTLLLTG | | |
| | AUUGAUUUGGAUUUUCCUGCCUUAAGAAAAA | | |
| 878 | TCTGTACGGTGACAAGGCGULLLACTLLLTG | | |
| | AUGGUACAAACAUUUCAAGAAGACAAAAGAT | | |
| 879 | TCTGTACGGTGACAAGGCGULLLACTLLLTG | | |
| | AUUGUGAUAAUUUGCAACAUAGUAAGAAGGG | | |
| 880 | TCTGTACGGTGACAAGGCGULLLACTLLLTG | | |
| | AUACAGUCAGAAUAUUCCUGUUCCUACUACA | | |
| 881 | TCTGTACGGTGACAAGGCGULLLACTLLLTG | | |
| | AUGUCUCAAAGUAAACUAUUGUUAGCAACCA | | |
| | T | | |
| 882 | TCTGTACGGTGACAAGGCGULLLACTLLLTG | | |
| | AUCAAUGCAAAUUAGUUUCUUGCAAGAGAAA | | |
| | A | | |
| 883 | TCTGTACGGTGACAAGGCGULLLACTLLLTG | | |
| | AUUGAUAAACUUCAGAAAGAACUCAAUGUAC | | |
| | T | | |
| 884 | TCTGTACGGTGACAAGGCGULLLACTLLLTG | | |
| | AUAACUGGAGAGAUAUGUCAAGUCUUGUUUA | | |
| | C | | |
| 885 | TCTGTACGGTGACAAGGCGULLLACTLLLTG | | |
| | AUGAUGACAAAAAGCUUCAGAGUUCUCUAAA | | |
| | A | | |
| 886 | TCTGTACGGTGACAAGGCGULLLACTLLLTG | | |
| | AUAUGAGAAAGAAGAAGAAUUCCUCACUAAU | | |
| | G | | |
| 887 | TCTGTACGGTGACAAGGCGULLLACTLLLTG | | |
| | AUUGAAAAGAACAAGAGAUGAAUUGAUAGAG | | |
| | T | | |
| 888 | TCTGTACGGTGACAAGGCGULLLACTLLLTG | | |
| | AUUAUGCAAAUUUCACAGAGCCUCAGUUUUA | | |
| | T | | |
| 889 | TCTGTACGGTGACAAGGCGULLLACTLLLTG | | |
| | AUUAAUACCAAAAGUUACCAAAACUGCAGAC | | |
| | A | | |
| 890 | TCTGTACGGTGACAAGGCGULLLACTLLLTG | | |
| | AUGAAGAAGACCUUUCUGUGGAAAUAGAUGA | | |
| | C | | |
| 891 | TCTGTACGGTGACAAGGCGULLLACTLLLTG | | |
| | AUUUGGAAAUUAUGGAAAUCAAGCAACUUCA | | |
| | A | | |
| 892 | TCTGTACGGTGACAAGGCGULLLACTLLLTG | | |
| | AUAUGGAAAAGGAGCACUUAAAUAAGGUUCA | | |
| | G | | |
| 893 | TCTGTACGGTGACAAGGCGULLLACTLLLTG | | |
| | AUUCCUUUCUUGAAAAUAAUCUUGAACAGCU | | |
| | C | | |
| 894 | TCTGTACGGTGACAAGGCGULLLACTLLLTG | | |
| | AUCAGCUUAAAGUUGAUAAAGAGAAGUGGUU | | |
| | A | | |
| 895 | TCTGTACGGTGACAAGGCGULLLACTLLLTG | | |
| | AUGACCGGCAAAUUAAAGCAAUUAUGAAAGA | | |
| | A | | |
| 896 | TCTGTACGGTGACAAGGCGULLLACTLLLTG | | |
| | AUCAGCUACAUCAAUCCUUGAGUAUCCUAUU | | |
| | G | | |
| 897 | TCTGTACGGTGACAAGGCGULLLACTLLLTG | | |
| | AUGGACUGCACUUUUAUUCAUCAAUUCAUAG | | |
| | A | | |
| 898 | TCTGTACGGTGACAAGGCGULLLACTLLLTG | | |
| | AUCACAAGAUAAAGUGAUUUCAGGAAUAGCA | | |
| | A | | |
| 899 | TCTGTACGGTGACAAGGCGULLLACTLLLTG | | |
| | AUGAAAAGGAAAAUCUGCAAAGAACUUUCCU | | |
| | G | | |
| 900 | TCTGTACGGTGACAAGGCGULLLACTLLLTG | | |
| | AUAGAAGGAAUUAGAGAAUGCAAAUGACCUU | | |
| | C | | |
| 901 | TCTGTACGGTGACAAGGCGULLLACTLLLTG | | |
| | AUAAAAAUGCAGUCAGAUAUGGAGAAAAUCC | | |
| | A | | |
| 902 | TCTGTACGGTGACAAGGCGULLLACTLLLTG | | |
| | AUUCUACUACGAAAUUCUUAAUUCCCCUGAC | | |
| | C | | |
| 903 | TCTGTACGGTGACAAGGCGULLLACTLLLTG | | |
| | AUGGUUCCUAAUAUGUAUUGGGAUGUUGGUA | | |
| | A | | |
| 904 | TCTGTACGGTGACAAGGCGULLLACTLLLTG | | |
| | AUGUUCUCUUCGUCAUGAUCAACAAAUAUGG | | |
| | T | | |
| 905 | TCTGTACGGTGACAAGGCGULLLACTLLLTG | | |
| | AUACAGAAAUGGUUUCAAAUGAAUCUGUAGA | | |
| | CT | | |
| 906 | TCTGTACGGTGACAAGGCGULLLACTLLLTG | | |
| | AUAACAUGUUCAUGCUGUGUAUGUAAUAGAA | | |
| | UG | | |
| 907 | TCTGTACGGTGACAAGGCGULLLACTLLLTG | | |
| | AUGAAAGCUUUAAAUGCACUAAAUAACCUGA | | |
| | GT | | |
| 908 | TCTGTACGGTGACAAGGCGULLLACTLLLTG | | |
| | AUGAAUAUGAUCAACUCCUGAAAGAACACUC | | |
| | UG | | |
| 909 | TCTGTACGGTGACAAGGCGULLLACTLLLTG | | |
| | AUCAGUUUACUCCAGUAAAAAUUGAAGGUUA | | |
| | UG | | |
| 910 | TCTGTACGGTGACAAGGCGULLLACTLLLTG | | |
| | AUAAUAUUUGCGAUUAUUGAAGCUGCUUAAU | | |
| | GT | | |
| 911 | TCTGTACGGTGACAAGGCGULLLACTLLLTG | | |
| | AUACACAGUUAAUAUGCCAGAAAAAGAAAGA | | |
| | AA | | |
| 912 | TCTGTACGGTGACAAGGCGULLLACTLLLTG | | |
| | AUGAUCUGUGCUCAAUAAUCAGUUGUUAGAA | | |
| | AT | | |
| 913 | TCTGTACGGTGACAAGGCGULLLACTLLLTG | | |
| | AUUGGAUUUGUUUCUCAUUCUCAUAUUUCAC | | |
| | CA | | |
| 914 | TCTGTACGGTGACAAGGCGULLLACTLLLTG | | |
| | AUAAAAUAAUUCUGUGGGAUCAUGAUCUGAA | | |
| | UC | | |
| 915 | TCTGTACGGTGACAAGGCGULLLACTLLLTG | | |
| | AUAUCCGGGUAUAAUAAUGAAGUUAAAAGAG | | |
| | CA | | |
| 916 | TCTGTACGGTGACAAGGCGULLLACTLLLTG | | |
| | AUGCUCAUAUUCUACUUCAUUCAGAAGAUCA | | |
| | GG | | |
| 917 | TCTGTACGGTGACAAGGCGULLLACTLLLTG | | |
| | AUCCCGAUUUAAUUCACAUUUAUAAAGGCUU | | |
| | UG | | |
| 918 | TCTGTACGGTGACAAGGCGULLLACTLLLTG | | |
| | AUGUAACUAAAUUGGAGAAAAGCAUUGAUGA | | |
| | CT | | |
| 919 | TCTGTACGGTGACAAGGCGULLLACTLLLTG | | |
| | AUGUUUUCGAAUUUCUCGAACUAAUGUAUAG | | |
| | AAG | | |
| 920 | TCTGTACGGTGACAAGGCGULLLACTLLLTG | | |
| | AUAAAAACAAAGUGGACAACUAGAAAGAUUU | | |
| | UGA | | |
| 921 | TCTGTACGGTGACAAGGCGULLLACTLLLTG | | |
| | AUUCUUCCUAAGUGCAAAAGAUAACUUUAUA | | |
| | UCA | | |
| 922 | TCTGTACGGTGACAAGGCGULLLACTLLLTG | | |
| | AUGACAUAACAGUUAUGAUUUUGCAGAAAAC | | |
| | AGA | | |
| 923 | TCTGTACGGTGACAAGGCGULLLACTLLLTG | | |
| | AUCCUUUCAGAAAUUUCUUCAAAUAAACAGA | | |
| | ACC | | |
| 924 | TCTGTACGGTGACAAGGCGULLLACTLLLTG | | |
| | AUAGAAGAAUGACAAAGAUAAGAAGAUAGCU | | |
| | GAG | | |
| 925 | TCTGTACGGTGACAAGGCGULLLACTLLLTG | | |
| | AUGAUGUAGAUUUUAAUCUGAACUUUGAACC | | |
| | AUC | | |
| 926 | TCTGTACGGTGACAAGGCGULLLACTLLLTG | | |
| | AUAGGAGGAACUCUUUACUAUGAAGUUAAUA | | |
| | GAA | | |
| 927 | TCTGTACGGTGACAAGGCGULLLACTLLLTG | | |
| | AUGGAGAAGACAUCAACCAAUUAAUCAUAAA | | |
| | UAC | | |
| 928 | TCTGTACGGTGACAAGGCGULLLACTLLLTG | | |
| | AUAUUAUUUUCAUGCUUUGGAGAUUGGAUAU | | |
| | AGG | | |
| 929 | TCTGTACGGTGACAAGGCGULLLACTLLLTG | | |
| | AUGAAUCCUUAUCAAUCAUCAAUGAAAAAGU | | |
| | ACC | | |
| 930 | TCTGTACGGTGACAAGGCGULLLACTLLLTG | | |
| | AUGAUGAUUUACUUGGAGAAGAUUUGCUAUC | | |
| | UGG | | |
| 931 | TCTGTACGGTGACAAGGCGULLLACTLLLTG | | |
| | AUCAGGAAGAAAAUCAUCAAUUACGAAGUGA | | |
| | AAA | | |
| 932 | TCTGTACGGTGACAAGGCGULLLACTLLLTG | | |
| | AUAGGAAGAAAUCAAGAUUCUUACUGAUAAA | | |
| | CUC | | |
| 933 | TCTGTACGGTGACAAGGCGULLLACTLLLTG | | |
| | AUUAGAACCAAUGAGAGACUAUCUCAAGAAC | | |
| | UUG | | |
| 934 | TCTGTACGGTGACAAGGCGULLLACTLLLTG | | |
| | AUUAUGAUGAGACAGAUCCAUUUAUUGAUAA | | |
| | CUC | | |
| 935 | TCTGTACGGTGACAAGGCGULLLACTLLLTG | | |
| | AUAAGAACUUAAACGAAAAUUGAACAUUCUG | | |
| | ACT | | |
| 936 | TCTGTACGGTGACAAGGCGULLLACTLLLTG | | |
| | AUAGCAAGCUGGUAUUUUCAUACAAAUUCUU | | |
| | CUA | | |
| 937 | TCTGTACGGTGACAAGGCGULLLACTLLLTG | | |
| | AUCAGAUAUUUAUCCAAACAUUAUUGCUAUG | | |
| | GGAT | | |
| 938 | TCTGTACGGTGACAAGGCGULLLACTLLLTG | | |
| | AUACUAAAUAGUUUAAGAUGAGUCAUAUUUG | | |
| | UGGG | | |
| 939 | TCTGTACGGTGACAAGGCGULLLACTLLLTG | | |
| | AUUCUCAUCUCUAAAGGAUUUAAUUACAAAG | | |
| | AUGC | | |
| 940 | TCTGTACGGTGACAAGGCGULLLACTLLLTG | | |
| | AUCUCUAUGUAGUCUCUGAAAAUGGAAGAAA | | |
| | AUAT | | |
| 941 | TCTGTACGGTGACAAGGCGULLLACTLLLTG | | |
| | AUCAACAAGAUAGAAGAUUUGGAGCAAGAAA | | |
| | UAAA | | |
| 942 | TCTGTACGGTGACAAGGCGULLLACTLLLTG | | |
| | AUCAUGCAACUUACUGAAAAAUACUAUAAAU | | |
| | GACC | | |
| 943 | TCTGTACGGTGACAAGGCGULLLACTLLLTG | | |
| | AUCCUUAUUAAAGAACUUUCUAAAGUAAUUC | | |
| | GAGC | | |
| 944 | TCTGTACGGTGACAAGGCGULLLACTLLLTG | | |
| | AUCUCAGGACUCAUUAUUUUAACAUUUGGGA | | |
| | GAAA | | |
| 945 | TCTGTACGGTGACAAGGCGULLLACTLLLTG | | |
| | AUGCCCUAUAUUUGCAUUAAAAUGGAAUAAG | | |
| | AAAG | | |
| 946 | TCTGTACGGTGACAAGGCGULLLACTLLLTG | | |
| | AUGAAUUAAAUGCCCACAUAAAACUUUCUAA | | |
| | UUUG | | |
| 947 | TCTGTACGGTGACAAGGCGULLLACTLLLTG | | |
| | AUAGUUGCUAUAUUUACACUGAUGGUAGAAA | | |
| | UAAA | | |
| 948 | TCTGTACGGTGACAAGGCGULLLACTLLLTG | | |
| | AUCCUAUAUUACAGAUUCUAUUCAUGAACAA | | |
| | UGCT | | |
| 949 | TCTGTACGGTGACAAGGCGULLLACTLLLTG | | |
| | AUCUCUCCACGCUCCCUCCA | | |
| 950 | TCTGTACGGTGACAAGGCGULLLACTLLLTG | | |
| | AUUGUUUACUACCAAAUGGAAUGAUAGUGAC | | |
| 951 | TCTGTACGGTGACAAGGCGULLLACTLLLTG | | |
| | AUGCUUCUUCUGCUGCUCGT | | |
| 952 | TCTGTACGGTGACAAGGCGULLLACTLLLTG | | |
| | AUGGUCGUGUUCUUCAUUCGGCACAG | | |
| 953 | TCTGTACGGTGACAAGGCGULLLACTLLLTG | | |
| | AUAAGAUCCCAUUGUCUAUGAAAUUCAUCCA | | |
| | A | | |
| 954 | TCTGTACGGTGACAAGGCGULLLACTLLLTG | | |
| | AUCCCCCUACAGCGCAUCC | | |
| 955 | TCTGTACGGTGACAAGGCGULLLACTLLLTG | | |
| | AUGGAAUUCCCUCGGAAGAACUUG | | |
| 956 | TCTGTACGGTGACAAGGCGULLLACTLLLTG | | |
| | AUCAUCUGAAAGGCAGAGCAGG | | |
| 957 | TCTGTACGGTGACAAGGCGULLLACTLLLTG | | |
| | AUUCCCCAUUGGACUGUAUUUUUGCC | | |
| 958 | TCTGTACGGTGACAAGGCGULLLACTLLLTG | | |
| | AUCCCGAUGUCAUUCGGGUC | | |
| 959 | TCTGTACGGTGACAAGGCGULLLACTLLLTG | | |
| | AUAGAUGGGCUAGUCAGGACUCUUC | | |
| 960 | TCTGTACGGTGACAAGGCGULLLACTLLLTG | | |
| | AUUCCACGUCUCUGUUUCCACA | | |
| 961 | TCTGTACGGTGACAAGGCGULLLACTLLLTG | | |
| | AUUUUGUCCCGUCAAAGCCC | | |
| 962 | TCTGTACGGTGACAAGGCGULLLACTLLLTG | | |
| | AUGGGUGCUCCCCUCCCUAC | | |
| 963 | TCTGTACGGTGACAAGGCGULLLACTLLLTG | | |
| | AUCUGCGUGGGCUUGUGCA | | |
| 964 | TCTGTACGGTGACAAGGCGULLLACTLLLTG | | |
| | AUACGGCAUAGAUGUGGCCAT | | |
| 965 | TCTGTACGGTGACAAGGCGULLLACTLLLTG | | |
| | AUGCACGUUCAGGUCGUCC | | |
| 966 | TCTGTACGGTGACAAGGCGULLLACTLLLTG | | |
| | AUGCCAGGUGCCGUCACUG | | |
| 967 | TCTGTACGGTGACAAGGCGULLLACTLLLTG | | |
| | AUGCUGGAGUCGGUGUUGC | | |
| 968 | TCTGTACGGTGACAAGGCGULLLACTLLLTG | | |
| | AUAUACCCGGAUCUCAGUGUCUUGG | | |
| 969 | TCTGTACGGTGACAAGGCGULLLACTLLLTG | | |
| | AUCAGCAGCGCCUGGACGUA | | |
| 970 | TCTGTACGGTGACAAGGCGULLLACTLLLTG | | |
| | AUGACAGGGCUGGAUGAGGC | | |
| 971 | TCTGTACGGTGACAAGGCGULLLACTLLLTG | | |
| | AUGCGAUGCCGAUGGCAUT | | |
| 972 | TCTGTACGGTGACAAGGCGULLLACTLLLTG | | |
| | AUGGAGAUGGAGGCCGUGT | | |
| 973 | TCTGTACGGTGACAAGGCGULLLACTLLLTG | | |
| | AUGGCGUACAUCACCGCGT | | |
| 974 | TCTGTACGGTGACAAGGCGULLLACTLLLTG | | |
| | AUAGCUGCUGGCUGAGCCG | | |
| 975 | TCTGTACGGTGACAAGGCGULLLACTLLLTG | | |
| | AUCAUCCCUGGUCCUUCUCCUGA | | |
| 976 | TCTGTACGGTGACAAGGCGULLLACTLLLTG | | |
| | AUGCCAAGCUCAUCGGCAA | | |
| 977 | TCTGTACGGTGACAAGGCGULLLACTLLLTG | | |
| | AUCGGAGGGCGAGCUGAUG | | |
| 978 | TCTGTACGGTGACAAGGCGULLLACTLLLTG | | |
| | AUGCUCACCCGCGGACUCA | | |
| 979 | TCTGTACGGTGACAAGGCGULLLACTLLLTG | | |
| | AUGUGCAGGAGGGCCGUCA | | |
| 980 | TCTGTACGGTGACAAGGCGULLLACTLLLTG | | |
| | AUACACCCCUGUCCUCUCUGT | | |
| 981 | TCTGTACGGTGACAAGGCGULLLACTLLLTG | | |
| | AUCCGCCCCCUGAGCUGUGT | | |
| 982 | TCTGTACGGTGACAAGGCGULLLACTLLLTG | | |
| | AUCCAGGACGGGUGUGUGC | | |
| 983 | TCTGTACGGTGACAAGGCGULLLACTLLLTG | | |
| | AUCACGUGCCUACCUCGGCCA | | |
| 984 | TCTGTACGGTGACAAGGCGULLLACTLLLTG | | |
| | AUGGACACCUUCUCCGGCT | | |
| 985 | TCTGTACGGTGACAAGGCGULLLACTLLLTG | | |
| | AUUCCCUGAGGGCUGCACG | | |
| 986 | TCTGTACGGTGACAAGGCGULLLACTLLLTG | | |
| | AUCGCCUUUCUUCCCUCCCCUC | | |
| 987 | TCTGTACGGTGACAAGGCGULLLACTLLLTG | | |
| | AUCAUCCCGGGCGACUGUGG | | |
| 988 | TCTGTACGGTGACAAGGCGULLLACTLLLTG | | |
| | AUAGCUGACAGGCUCCUCGC | | |
| 989 | TCTGTACGGTGACAAGGCGULLLACTLLLTG | | |
| | AUAGGACCUCUUCGACAUCGAG | | |
| 990 | TCTGTACGGTGACAAGGCGULLLACTLLLTG | | |
| | AUGGGCGUUUGCAGCUGGT | | |
| 991 | TCTGTACGGTGACAAGGCGULLLACTLLLTG | | |
| | AUCGUGAAGUCCUGAGUGUAGAUGAUG | | |
| 992 | TCTGTACGGTGACAAGGCGULLLACTLLLTG | | |
| | AUCAGCUGAGCACCAAAUCCAGG | | |
| 993 | TCTGTACGGTGACAAGGCGULLLACTLLLTG | | |
| | AUGCUCAGGCCACACUUGCC | | |

Each L independently is A, C, G or T

[0227] In view of the many possible embodiments to which the principles of the disclosure may be applied, it should be recognized that the illustrated embodiments are only examples and should not be taken as limiting the scope of the invention. Rather, the scope of the invention is defined by the following claims. We therefore claim as our invention all that comes within the scope and spirit of these claims.

The application's sequence listing, which the Patent Office published only in electronic form, follows.

SEQUENCE LISTING (1559 sequences)

SEQ ID NO: 1 - DNA, 49 bp, synthetic construct
  misc_feature 1..49: note = Synthetic Primer
  misc_difference 21..23: note = n is a, c, g, t or u
  misc_difference 27..29: note = n is a, c, g, t or u
  modified_base 20: mod_base = OTHER; note = uracil
  modified_base 33: mod_base = OTHER; note = uracil
  modified_base 38: mod_base = OTHER; note = uracil
  modified_base 46: mod_base = OTHER; note = uracil
  source 1..49: mol_type = other DNA
tctgtacggtgacaaggcgtnnnactnnntgatcgagtcgggctctgga

SEQ ID NO: 2 - DNA, 50 bp, synthetic construct
  misc_feature 1..50: note = Synthetic Primer
  misc_difference 21..23: note = n is a, c, g, t or u
  misc_difference 27..29: note = n is a, c, g, t or u
  modified_base 20: mod_base = OTHER; note = uracil
  modified_base 33: mod_base = OTHER; note = uracil
  modified_base 35: mod_base = OTHER; note = uracil
  modified_base 38: mod_base = OTHER; note = uracil
  modified_base 47: mod_base = OTHER; note = uracil
  modified_base 49: mod_base = OTHER; note = uracil
  source 1..50: mol_type = other DNA
tctgtacggtgacaaggcgtnnnactnnntgatgtggtgccgagcctctg

SEQ ID NO: 3 - DNA, 50 bp, synthetic construct
  misc_feature 1..50: note = Synthetic Primer
  misc_difference 21..23: note = n is a, c, g, t or u
  misc_difference 27..29: note = n is a, c, g, t or u
  modified_base 20: mod_base = OTHER; note = uracil
  modified_base 33..34: mod_base = OTHER; note = uracil
  modified_base 38: mod_base = OTHER; note = uracil
  modified_base 43: mod_base = OTHER; note = uracil
  source 1..50: mol_type = other DNA
tctgtacggtgacaaggcgtnnnactnnntgattgcctcacctccaccgt

SEQ ID NO: 4 - DNA, 50 bp, synthetic construct
  misc_feature 1..50: note = Synthetic Primer
  misc_difference 21..23: note = n is a, c, g, t or u
  misc_difference 27..29: note = n is a, c, g, t or u
  modified_base 20: mod_base = OTHER; note = uracil
  modified_base 33: mod_base = OTHER; note = uracil
  modified_base 36: mod_base = OTHER; note = uracil
  modified_base 42: mod_base = OTHER; note = uracil
  source 1..50: mol_type = other DNA
tctgtacggtgacaaggcgtnnnactnnntgatgatggccatggcgcgga

SEQ ID NO: 5 - DNA, 50 bp, synthetic construct
  misc_feature 1..50: note = Synthetic Primer
  misc_difference 21..23: note = n is a, c, g, t or u
  misc_difference 27..29: note = n is a, c, g, t or u
  modified_base 20: mod_base = OTHER; note = uracil
  modified_base 33..34: mod_base = OTHER; note = uracil
  modified_base 36: mod_base = OTHER; note = uracil
  modified_base 39: mod_base = OTHER; note = uracil
  modified_base 41: mod_base = OTHER; note = uracil
  modified_base 43: mod_base = OTHER; note = uracil
  source 1..50: mol_type = other DNA
tctgtacggtgacaaggcgtnnnactnnntgattgtcgtctctccagccc

SEQ ID NO: 6 - DNA, 50 bp, synthetic construct
  misc_feature 1..50: note = Synthetic Primer
  misc_difference 21..23: note = n is a, c, g, t or u
  misc_difference 27..29: note = n is a, c, g, t or u
  modified_base 20: mod_base = OTHER; note = uracil
  modified_base 33: mod_base = OTHER; note = uracil
  modified_base 40: mod_base = OTHER; note = uracil
  modified_base 46: mod_base = OTHER; note = uracil
  modified_base 49: mod_base = OTHER; note = uracil
  source 1..50: mol_type = other DNA
tctgtacggtgacaaggcgtnnnactnnntgatggcccctgagcgtcatc

SEQ ID NO: 7 - DNA, 50 bp, synthetic construct
  misc_feature 1..50: note = Synthetic Primer
  misc_difference 21..23: note = n is a, c, g, t or u
  misc_difference 27..29: note = n is a, c, g, t or u
  modified_base 20: mod_base = OTHER; note = uracil
  modified_base 33: mod_base = OTHER; note = uracil
  modified_base 36: mod_base = OTHER; note = uracil
  modified_base 38: mod_base = OTHER; note = uracil
  modified_base 49: mod_base = OTHER; note = uracil
  source 1..50: mol_type = other DNA
tctgtacggtgacaaggcgtnnnactnnntgatcgtctgaggagcccgtg

SEQ ID NO: 8 - DNA, 50 bp, synthetic construct
  misc_feature 1..50: note = Synthetic Primer
  misc_difference 21..23: note = n is a, c, g, t or u
  misc_difference 27..29: note = n is a, c, g, t or u
  modified_base 20: mod_base = OTHER; note = uracil
  modified_base 33: mod_base = OTHER; note = uracil
  modified_base 38: mod_base = OTHER; note = uracil
  modified_base 41: mod_base = OTHER; note = uracil
  modified_base 49: mod_base = OTHER; note = uracil
  source 1..50: mol_type = other DNA
tctgtacggtgacaaggcgtnnnactnnntgatagcgtcctcccagcgta

SEQ ID NO: 9 - DNA, 50 bp, synthetic construct
  misc_feature 1..50: note = Synthetic Primer
  misc_difference 21..23: note = n is a, c, g, t or u
  misc_difference 27..29: note = n is a, c, g, t or u
  modified_base 20: mod_base = OTHER; note = uracil
  modified_base 33: mod_base = OTHER; note = uracil
  modified_base 44: mod_base = OTHER; note = uracil
  modified_base 47: mod_base = OTHER; note = uracil
  source 1..50: mol_type = other DNA
tctgtacggtgacaaggcgtnnnactnnntgatggcgaccccctcatcat

SEQ ID NO: 10 - DNA, 53 bp, synthetic construct
  misc_feature 1..53: note = Synthetic Primer
  misc_difference 21..23: note = n is a, c, g, t or u
  misc_difference 27..29: note = n is a, c, g, t or u
  modified_base 20: mod_base = OTHER; note = uracil
  modified_base 33..34: mod_base = OTHER; note = uracil
  modified_base 39: mod_base = OTHER; note = uracil
  modified_base 42..43: mod_base = OTHER; note = uracil
  source 1..53: mol_type = other DNA
tctgtacggtgacaaggcgtnnnactnnntgattgaactacttggaggaccgt

SEQ ID NO: 11 - DNA, 50 bp, synthetic construct
  misc_feature 1..50: note = Synthetic Primer
  misc_difference 21..23: note = n is a, c, g, t or u
  misc_difference 27..29: note = n is a, c, g, t or u
  modified_base 20: mod_base = OTHER; note = uracil
  modified_base 33: mod_base = OTHER; note = uracil
  modified_base 35: mod_base = OTHER; note = uracil
  modified_base 43: mod_base = OTHER; note = uracil
  source 1..50: mol_type = other DNA
tctgtacggtgacaaggcgtnnnactnnntgatctgggacagtgggccaa

SEQ ID NO: 12 - DNA, 50 bp, synthetic construct
  misc_feature 1..50: note = Synthetic Primer
  misc_difference 21..23: note = n is a, c, g, t or u
  misc_difference 27..29: note = n is a, c, g, t or u
  modified_base 20: mod_base = OTHER; note = uracil
  modified_base 33: mod_base = OTHER; note = uracil
  modified_base 38: mod_base = OTHER; note = uracil
  modified_base 48: mod_base = OTHER; note = uracil
  source 1..50: mol_type = other DNA
tctgtacggtgacaaggcgtnnnactnnntgatcagctgggccagagtgt

SEQ ID NO: 13 - DNA, 50 bp, synthetic construct
  misc_feature 1..50: note = Synthetic Primer
  misc_difference 21..23: note = n is a, c, g, t or u
  misc_difference 27..29: note = n is a, c, g, t or u
  modified_base 20: mod_base = OTHER; note = uracil
  modified_base 33: mod_base = OTHER; note = uracil
  modified_base 38: mod_base = OTHER; note = uracil
  modified_base 43: mod_base = OTHER; note = uracil
  modified_base 46: mod_base = OTHER; note = uracil
  source 1..50: mol_type = other DNA
tctgtacggtgacaaggcgtnnnactnnntgataacatggcctcctccgc

SEQ ID NO: 14 - DNA, 50 bp, synthetic construct
  misc_feature 1..50: note = Synthetic Primer
  misc_difference 21..23: note = n is a, c, g, t or u
  misc_difference 27..29: note = n is a, c, g, t or u
  modified_base 20: mod_base = OTHER; note = uracil
  modified_base 33: mod_base = OTHER; note = uracil
  modified_base 38: mod_base = OTHER; note = uracil
  modified_base 44: mod_base = OTHER; note = uracil
  modified_base 47: mod_base = OTHER; note = uracil
  source 1..50: mol_type = other DNA
tctgtacggtgacaaggcgtnnnactnnntgatcaggtccccatggtggc

SEQ ID NO: 15 - DNA, 50 bp, synthetic construct
  misc_feature 1..50: note = Synthetic Primer
  misc_difference 21..23: note = n is a, c, g, t or u
  misc_difference 27..29: note = n is a, c, g, t or u
  modified_base 20: mod_base = OTHER; note = uracil
  modified_base 33: mod_base = OTHER; note = uracil
  modified_base 41..42: mod_base = OTHER; note = uracil
  modified_base 46: mod_base = OTHER; note = uracil
  source 1..50: mol_type = other DNA
tctgtacggtgacaaggcgtnnnactnnntgatgggcgccttccatggag

SEQ ID NO: 16 - DNA, 50 bp, synthetic construct
  misc_feature 1..50: note = Synthetic Primer
  misc_difference 21..23: note = n is a, c, g, t or u
  misc_difference 27..29: note = n is a, c, g, t or u
  modified_base 20: mod_base = OTHER; note = uracil
  modified_base 33: mod_base = OTHER; note = uracil
  modified_base 35: mod_base = OTHER; note = uracil
  modified_base 43: mod_base = OTHER; note = uracil
  source 1..50: mol_type = other DNA
tctgtacggtgacaaggcgtnnnactnnntgatgtgcagcagtggagcca

SEQ ID NO: 17 - DNA, 50 bp, synthetic construct
  misc_feature 1..50: note = Synthetic Primer
  misc_difference 21..23: note = n is a, c, g, t or u
  misc_difference 27..29: note = n is a, c, g, t or u
  modified_base 20: mod_base = OTHER; note = uracil
  modified_base 33..34: mod_base = OTHER; note = uracil
  modified_base 43: mod_base = OTHER; note = uracil
  modified_base 46: mod_base = OTHER; note = uracil
  modified_base 49: mod_base = OTHER; note = uracil
  source 1..50: mol_type = other DNA
tctgtacggtgacaaggcgtnnnactnnntgattccaggacgtgctgctc

SEQ ID NO: 18 - DNA, 50 bp, synthetic construct
  misc_feature 1..50: note = Synthetic Primer
  misc_difference 21..23: note = n is a, c, g, t or u
  misc_difference 27..29: note = n is a, c, g, t or u
  modified_base 20: mod_base = OTHER; note = uracil
  modified_base 33: mod_base = OTHER; note = uracil
  modified_base 35: mod_base = OTHER; note = uracil
  modified_base 44: mod_base = OTHER; note = uracil
  modified_base 47..48: mod_base = OTHER; note = uracil
  source 1..50: mol_type = other DNA
tctgtacggtgacaaggcgtnnnactnnntgatctgggcaacgtggttgg

SEQ ID NO: 19 - DNA, 50 bp, synthetic construct
  misc_feature 1..50: note = Synthetic Primer
  misc_difference 21..23: note = n is a, c, g, t or u
  misc_difference 27..29: note = n is a, c, g, t or u
  modified_base 20: mod_base = OTHER; note = uracil
  modified_base 33..34: mod_base = OTHER; note = uracil
  modified_base 38: mod_base = OTHER; note = uracil
  modified_base 45: mod_base = OTHER; note = uracil
  source 1..50: mol_type = other DNA
tctgtacggtgacaaggcgtnnnactnnntgattccatcgagcctccgac

SEQ ID NO: 20 - DNA, 50 bp, synthetic construct
  misc_feature 1..50: note = Synthetic Primer
  misc_difference 21..23: note = n is a, c, g, t or u
  misc_difference 27..29: note = n is a, c, g, t or u
  modified_base 20: mod_base = OTHER; note = uracil
  modified_base 33: mod_base = OTHER; note = uracil
  modified_base 36: mod_base = OTHER; note = uracil
  modified_base 43: mod_base = OTHER; note = uracil
  source 1..50: mol_type = other DNA
tctgtacggtgacaaggcgtnnnactnnntgatgctgcaacctgcagcac

SEQ ID NO: 21 - DNA, 50 bp, synthetic construct
  misc_feature 1..50: note = Synthetic Primer
  misc_difference 21..23: note = n is a, c, g, t or u
  misc_difference 27..29: note = n is a, c, g, t or u
  modified_base 20: mod_base = OTHER; note = uracil
  modified_base 33..37: mod_base = OTHER; note = uracil
  modified_base 40: mod_base = OTHER; note = uracil
  source 1..50: mol_type = other DNA
tctgtacggtgacaaggcgtnnnactnnntgatttttggtggcacgcagc

SEQ ID NO: 22 - DNA, 50 bp, synthetic construct
  misc_feature 1..50: note = Synthetic Primer
  misc_difference 21..23: note = n is a, c, g, t or u
  misc_difference 27..29: note = n is a, c, g, t or u
  modified_base 20: mod_base = OTHER; note = uracil
  modified_base 33..34: mod_base = OTHER; note = uracil
  modified_base 36: mod_base = OTHER; note = uracil
  modified_base 38..39: mod_base = OTHER; note = uracil
  source 1..50: mol_type = other DNA
tctgtacggtgacaaggcgtnnnactnnntgattgtcttccccaacggca

SEQ ID NO: 23 - DNA, 50 bp, synthetic construct
  misc_feature 1..50: note = Synthetic Primer
  misc_difference 21..23: note = n is a, c, g, t or u
  misc_difference 27..29: note = n is a, c, g, t or u
  modified_base 20: mod_base = OTHER; note = uracil
  modified_base 33: mod_base = OTHER; note = uracil
  modified_base 38: mod_base = OTHER; note = uracil
  modified_base 44: mod_base = OTHER; note = uracil
  modified_base 46: mod_base = OTHER; note = uracil
  source 1..50: mol_type = other DNA
tctgtacggtgacaaggcgtnnnactnnntgatggcgtggagctatgggt

SEQ ID NO: 24 - DNA, 50 bp, synthetic construct
  misc_feature 1..50: note = Synthetic Primer
  misc_difference 21..23: note = n is a, c, g, t or u
  misc_difference 27..29: note = n is a, c, g, t or u
  modified_base 20: mod_base = OTHER; note = uracil
  modified_base 33: mod_base = OTHER; note = uracil
  modified_base 36: mod_base = OTHER; note = uracil
  modified_base 45: mod_base = OTHER; note = uracil
  source 1..50: mol_type = other DNA
tctgtacggtgacaaggcgtnnnactnnntgatcctgcccccactcccag

SEQ ID NO: 25 - DNA, 50 bp, synthetic construct
  misc_feature 1..50: note = Synthetic Primer
  misc_difference 21..23: note = n is a, c, g, t or u
  misc_difference 27..29: note = n is a, c, g, t or u
  modified_base 20: mod_base = OTHER; note = uracil
  modified_base 33: mod_base = OTHER; note = uracil
  modified_base 40: mod_base = OTHER; note = uracil
  modified_base 43: mod_base = OTHER; note = uracil
  modified_base 48: mod_base = OTHER; note = uracil
  source 1..50: mol_type = other DNA
tctgtacggtgacaaggcgtnnnactnnntgatgaggcctcctgcactcc

SEQ ID NO: 26 - DNA, 50 bp, synthetic construct
  misc_feature 1..50: note = Synthetic Primer
  misc_difference 21..23: note = n is a, c, g, t or u
  misc_difference 27..29: note = n is a, c, g, t or u
  modified_base 20: mod_base = OTHER; note = uracil
  modified_base 33: mod_base = OTHER; note = uracil
  modified_base 41: mod_base = OTHER; note = uracil
  modified_base 47: mod_base = OTHER; note = uracil
  source 1..50: mol_type = other DNA
tctgtacggtgacaaggcgtnnnactnnntgataggacggtcggactccc

SEQ ID NO: 27 - DNA, 50 bp, synthetic construct
  misc_feature 1..50: note = Synthetic Primer
  misc_difference 21..23: note = n is a, c, g, t or u
  misc_difference 27..29: note = n is a, c, g, t or u
  modified_base 20: mod_base = OTHER; note = uracil
  modified_base 33: mod_base = OTHER; note = uracil
  modified_base 41: mod_base = OTHER; note = uracil
  modified_base 43: mod_base = OTHER; note = uracil
  source 1..50: mol_type = other DNA
tctgtacggtgacaaggcgtnnnactnnntgatcaggcgatgtcgccgaa

SEQ ID NO: 28 - DNA, 50 bp, synthetic construct
  misc_feature 1..50: note = Synthetic Primer
  misc_difference 21..23: note = n is a, c, g, t or u
  misc_difference 27..29: note = n is a, c, g, t or u
  modified_base 20: mod_base = OTHER; note = uracil
  modified_base 33: mod_base = OTHER; note = uracil
  modified_base 37..38: mod_base = OTHER; note = uracil
  modified_base 47..48: mod_base = OTHER; note = uracil
  source 1..50: mol_type = other DNA
tctgtacggtgacaaggcgtnnnactnnntgatggcttcgaggccgttga

SEQ ID NO: 29 - DNA, 50 bp, synthetic construct
  misc_feature 1..50: note = Synthetic Primer
  misc_difference 21..23: note = n is a, c, g, t or u
  misc_difference 27..29: note = n is a, c, g, t or u
  modified_base 20: mod_base = OTHER; note = uracil
  modified_base 33: mod_base = OTHER; note = uracil
  modified_base 43: mod_base = OTHER; note = uracil
  modified_base 45: mod_base = OTHER; note = uracil
  modified_base 49: mod_base = OTHER; note = uracil
  source 1..50: mol_type = other DNA
tctgtacggtgacaaggcgtnnnactnnntgatgcgaaggcgtctccctg

SEQ ID NO: 30 - DNA, 50 bp, synthetic construct
  misc_feature 1..50: note = Synthetic Primer
  misc_difference 21..23: note = n is a, c, g, t or u
  misc_difference 27..29: note = n is a, c, g, t or u
  modified_base 20: mod_base = OTHER; note = uracil
  modified_base 33: mod_base = OTHER; note = uracil
  modified_base 40..41: mod_base = OTHER; note = uracil
  modified_base 49: mod_base = OTHER; note = uracil
  source 1..50: mol_type = other DNA
tctgtacggtgacaaggcgtnnnactnnntgatggcggcttgggagaatg

SEQ ID NO: 31 - DNA, 50 bp, synthetic construct
  misc_feature 1..50: note = Synthetic Primer
  misc_difference 21..23: note = n is a, c, g, t or u
  misc_difference 27..29: note = n is a, c, g, t or u
  modified_base 20: mod_base = OTHER; note = uracil
  modified_base 33: mod_base = OTHER; note = uracil
  modified_base 35: mod_base = OTHER; note = uracil
  modified_base 42: mod_base = OTHER; note = uracil
  source 1..50: mol_type = other DNA
tctgtacggtgacaaggcgtnnnactnnntgatctacacggtgcgcgagg

SEQ ID NO: 32 - DNA, 50 bp, synthetic construct
  misc_feature 1..50: note = Synthetic Primer
  misc_difference 21..23: note = n is a, c, g, t or u
  misc_difference 27..29: note = n is a, c, g, t or u
  modified_base 20: mod_base = OTHER; note = uracil
  modified_base 33..34: mod_base = OTHER; note = uracil
  modified_base 36: mod_base = OTHER; note = uracil
  modified_base 38: mod_base = OTHER; note = uracil
  source 1..50: mol_type = other DNA
tctgtacggtgacaaggcgtnnnactnnntgattgtgtccagaggacccc

SEQ ID NO: 33 - DNA, 50 bp, synthetic construct
  misc_feature 1..50: note = Synthetic Primer
  misc_difference 21..23: note = n is a, c, g, t or u
  misc_difference 27..29: note = n is a, c, g, t or u
  modified_base 20: mod_base = OTHER; note = uracil
  modified_base 33: mod_base = OTHER; note = uracil
  modified_base 41: mod_base = OTHER; note = uracil
  modified_base 46: mod_base = OTHER; note = uracil
  source 1..50: mol_type = other DNA
tctgtacggtgacaaggcgtnnnactnnntgatggagccatgggctgcat

SEQ ID NO: 34 - DNA, 50 bp, synthetic construct
  misc_feature 1..50: note = Synthetic Primer
  misc_difference 21..23: note = n is a, c, g, t or u
  misc_difference 27..29: note = n is a, c, g, t or u
  modified_base 20: mod_base = OTHER; note = uracil
  modified_base 33: mod_base = OTHER; note = uracil
  modified_base 38: mod_base = OTHER; note = uracil
  modified_base 42: mod_base = OTHER; note = uracil
  modified_base 48: mod_base = OTHER; note = uracil
  source 1..50: mol_type = other DNA
tctgtacggtgacaaggcgtnnnactnnntgatcggctcagtgaggctcg

SEQ ID NO: 35 - DNA, 50 bp, synthetic construct
  misc_feature 1..50: note = Synthetic Primer
  misc_difference 21..23: note = n is a, c, g, t or u
  misc_difference 27..29: note = n is a, c, g, t or u
  modified_base 20: mod_base = OTHER; note = uracil
  modified_base 33: mod_base = OTHER; note = uracil
  modified_base 36: mod_base = OTHER; note = uracil
  modified_base 47: mod_base = OTHER; note = uracil
  modified_base 49: mod_base = OTHER; note = uracil
  source 1..50: mol_type = other DNA
tctgtacggtgacaaggcgtnnnactnnntgatggtgccacccgcctatg

SEQ ID NO: 36 - DNA, 50 bp, synthetic construct
  misc_feature 1..50: note = Synthetic Primer
  misc_difference 21..23: note = n is a, c, g, t or u
  misc_difference 27..29: note = n is a, c, g, t or u
  modified_base 20: mod_base = OTHER; note = uracil
  modified_base 33: mod_base = OTHER; note = uracil
  modified_base 38: mod_base = OTHER; note = uracil
  modified_base 41: mod_base = OTHER; note = uracil
  modified_base 46: mod_base = OTHER; note = uracil
  source 1..50: mol_type = other DNA
tctgtacggtgacaaggcgtnnnactnnntgatggagtgctggcatgccg

SEQ ID NO: 37 - DNA, 50 bp, synthetic construct
  misc_feature 1..50: note = Synthetic Primer
  misc_difference 21..23: note = n is a, c, g, t or u
  misc_difference 27..29: note = n is a, c, g, t or u
  modified_base 20: mod_base = OTHER; note = uracil
  modified_base 33: mod_base = OTHER; note = uracil
  modified_base 36: mod_base = OTHER; note = uracil
  modified_base 39: mod_base = OTHER; note = uracil
  modified_base 48: mod_base = OTHER; note = uracil
  source 1..50: mol_type = other DNA
tctgtacggtgacaaggcgtnnnactnnntgatgctggtggaggacctgg

SEQ ID NO: 38 - DNA, 50 bp, synthetic construct
  misc_feature 1..50: note = Synthetic Primer
  misc_difference 21..23: note = n is a, c, g, t or u
  misc_difference 27..29: note = n is a, c, g, t or u
  modified_base 20: mod_base = OTHER; note = uracil
  modified_base 33..35: mod_base = OTHER; note = uracil
  modified_base 41: mod_base = OTHER; note = uracil
  modified_base 47: mod_base = OTHER; note = uracil
  source 1..50: mol_type = other DNA
tctgtacggtgacaaggcgtnnnactnnntgatttggcactgagggtcgc

SEQ ID NO: 39 - DNA, 50 bp, synthetic construct
  misc_feature 1..50: note = Synthetic Primer
  misc_difference 21..23: note = n is a, c, g, t or u
  misc_difference 27..29: note = n is a, c, g, t or u
  modified_base 20: mod_base = OTHER; note = uracil
  modified_base 33: mod_base = OTHER; note = uracil
  modified_base 44: mod_base = OTHER; note = uracil
  modified_base 46: mod_base = OTHER; note = uracil
  modified_base 48: mod_base = OTHER; note = uracil
  source 1..50: mol_type = other DNA
tctgtacggtgacaaggcgtnnnactnnntgatgaacccgcgctctctga

SEQ ID NO: 40 - DNA, 50 bp, synthetic construct
  misc_feature 1..50: note = Synthetic Primer
  misc_difference 21..23: note = n is a, c, g, t or u
  misc_difference 27..29: note = n is a, c, g, t or u
  modified_base 20: mod_base = OTHER; note = uracil
  modified_base 33: mod_base = OTHER; note = uracil
  modified_base 39: mod_base = OTHER; note = uracil
  modified_base 44: mod_base = OTHER; note = uracil
  modified_base 46..47: mod_base = OTHER; note = uracil
  source 1..50: mol_type = other DNA
tctgtacggtgacaaggcgtnnnactnnntgatagagctcggctgttcca

SEQ ID NO: 41 - DNA, 50 bp, synthetic construct
  misc_feature 1..50: note = Synthetic Primer
  misc_difference 21..23: note = n is a, c, g, t or u
  misc_difference 27..29: note = n is a, c, g, t or u
  modified_base 20: mod_base = OTHER; note = uracil
  modified_base 33: mod_base = OTHER; note = uracil
  modified_base 36: mod_base = OTHER; note = uracil
  modified_base 49: mod_base = OTHER; note = uracil
  source 1..50: mol_type = other DNA
tctgtacggtgacaaggcgtnnnactnnntgatcctcagagccccacctg

SEQ ID NO: 42 - DNA, 50 bp, synthetic construct
  misc_feature 1..50: note = Synthetic Primer
  misc_difference 21..23: note = n is a, c, g, t or u
  misc_difference 27..29: note = n is a, c, g, t or u
  modified_base 20: mod_base = OTHER; note = uracil
  modified_base 33: mod_base = OTHER; note = uracil
  modified_base 36: mod_base = OTHER; note = uracil
  modified_base 39: mod_base = OTHER; note = uracil
  source 1..50: mol_type = other DNA
tctgtacggtgacaaggcgtnnnactnnntgatcgtgctggagagacccc

SEQ ID NO: 43 - DNA, 50 bp, synthetic construct
  misc_feature 1..50: note = Synthetic Primer
  misc_difference 21..23: note = n is a, c, g, t or u
  misc_difference 27..29: note = n is a, c, g, t or u
  modified_base 20: mod_base = OTHER; note = uracil
  modified_base 33: mod_base = OTHER; note = uracil
  modified_base 42: mod_base = OTHER; note = uracil
  modified_base 49: mod_base = OTHER; note = uracil
  source 1..50: mol_type = other DNA
tctgtacggtgacaaggcgtnnnactnnntgatgggagccgtcaacgatg

SEQ ID NO: 44 - DNA, 50 bp, synthetic construct
  misc_feature 1..50: note = Synthetic Primer
  misc_difference 21..23: note = n is a, c, g, t or u
  misc_difference 27..29: note = n is a, c, g, t or u
  modified_base 20: mod_base = OTHER; note = uracil
  modified_base 33: mod_base = OTHER; note = uracil
  modified_base 36: mod_base = OTHER; note = uracil
  modified_base 41: mod_base = OTHER; note = uracil
  modified_base 45: mod_base = OTHER; note = uracil
  modified_base 47..48: mod_base = OTHER; note = uracil
  source 1..50: mol_type = other DNA
tctgtacggtgacaaggcgtnnnactnnntgatcgtgccctccgtgttca

SEQ ID NO: 45 - DNA, 50 bp, synthetic construct
  misc_feature 1..50: note = Synthetic Primer
  misc_difference 21..23: note = n is a, c, g, t or u
  misc_difference 27..29: note = n is a, c, g, t or u
  modified_base 20: mod_base = OTHER; note = uracil
  modified_base 33: mod_base = OTHER; note = uracil
  modified_base 40: mod_base = OTHER; note = uracil
  modified_base 48: mod_base = OTHER; note = uracil
  source 1..50: mol_type = other DNA
tctgtacggtgacaaggcgtnnnactnnntgatccggcgtccacaactca

SEQ ID NO: 46 - DNA, 50 bp, synthetic construct
  misc_feature 1..50: note = Synthetic Primer
  misc_difference 21..23: note = n is a, c, g, t or u
  misc_difference 27..29: note = n is a, c, g, t or u
  modified_base 20: mod_base = OTHER; note = uracil
  modified_base 33: mod_base = OTHER; note = uracil
  modified_base 40: mod_base = OTHER; note = uracil
  modified_base 45: mod_base = OTHER; note = uracil
  modified_base 49: mod_base = OTHER; note = uracil
  source 1..50: mol_type = other DNA
tctgtacggtgacaaggcgtnnnactnnntgataggagatgccgtcggtg

SEQ ID NO: 47 - DNA, 50 bp, synthetic construct
  misc_feature 1..50: note = Synthetic Primer
  misc_difference 21..23: note = n is a, c, g, t or u
  misc_difference 27..29: note = n is a, c, g, t or u
  modified_base 20: mod_base = OTHER; note = uracil
  modified_base 33: mod_base = OTHER; note = uracil
  modified_base 36: mod_base = OTHER; note = uracil
  modified_base 41..42: mod_base = OTHER; note = uracil
  modified_base 45: mod_base = OTHER; note = uracil
  source 1..50: mol_type = other DNA
tctgtacggtgacaaggcgtnnnactnnntgatgctggccttcgtacggg

SEQ ID NO: 48 - DNA, 50 bp, synthetic construct
  misc_feature 1..50: note = Synthetic Primer
  misc_difference 21..23: note = n is a, c, g, t or u
  misc_difference 27..29: note = n is a, c, g, t or u
  modified_base 20: mod_base = OTHER; note = uracil
  modified_base 33: mod_base = OTHER; note = uracil
  modified_base 35: mod_base = OTHER; note = uracil
  modified_base 37: mod_base = OTHER; note = uracil
  modified_base 47: mod_base = OTHER; note = uracil
  source 1..50: mol_type = other DNA
tctgtacggtgacaaggcgtnnnactnnntgatatctgccagcggctcag

SEQ ID NO: 49 - DNA, 50 bp, synthetic construct
  misc_feature 1..50: note = Synthetic Primer
  misc_difference 21..23: note = n is a, c, g, t or u
  misc_difference 27..29: note = n is a, c, g, t or u
  modified_base 20: mod_base = OTHER; note = uracil
  modified_base 33: mod_base = OTHER; note = uracil
  modified_base 37: mod_base = OTHER; note = uracil
  modified_base 41: mod_base = OTHER; note = uracil
  modified_base 44: mod_base = OTHER; note = uracil
  modified_base 46: mod_base = OTHER; note = uracil
  source 1..50: mol_type = other DNA
tctgtacggtgacaaggcgtnnnactnnntgatagctgcatgatctgcgg

SEQ ID NO: 50 - DNA, 50 bp, synthetic construct
  misc_feature 1..50: note = Synthetic Primer
  misc_difference 21..23: note = n is a, c, g, t or u
  misc_difference 27..29: note = n is a, c, g, t or u
  modified_base 20: mod_base = OTHER; note = uracil
  modified_base 33: mod_base = OTHER; note = uracil
  modified_base 38: mod_base = OTHER; note = uracil
  modified_base 41: mod_base = OTHER; note = uracil
  source 1..50: mol_type = other DNA
tctgtacggtgacaaggcgtnnnactnnntgatgccgtcatgagacccga

SEQ ID NO: 51 - DNA, 50 bp, synthetic construct
  misc_feature 1..50: note = Synthetic Primer
  misc_difference 21..23: note = n is a, c, g, t or u
  misc_difference 27..29: note = n is a, c, g, t or u
  modified_base 20: mod_base = OTHER; note = uracil
  modified_base 33: mod_base = OTHER; note = uracil
  modified_base 39: mod_base = OTHER; note = uracil
  modified_base 41: mod_base = OTHER; note = uracil
  modified_base 43: mod_base = OTHER; note = uracil
  source 1..50: mol_type = other DNA
tctgtacggtgacaaggcgtnnnactnnntgatcagcctctctgcccagc

SEQ ID NO: 52 - DNA, 50 bp, synthetic construct
  misc_feature 1..50: note = Synthetic Primer
  misc_difference 21..23: note = n is a, c, g, t or u
  misc_difference 27..29: note = n is a, c, g, t or u
  modified_base 20: mod_base = OTHER; note = uracil
  modified_base 33: mod_base = OTHER; note = uracil
  modified_base 36..37: mod_base = OTHER; note = uracil
  modified_base 39: mod_base = OTHER; note = uracil
  modified_base 43: mod_base = OTHER; note = uracil
  modified_base 48: mod_base = OTHER; note = uracil
  source 1..50: mol_type = other DNA
tctgtacggtgacaaggcgtnnnactnnntgatcgttctgcctcccgtgg

SEQ ID NO: 53 - DNA, 50 bp, synthetic construct
  misc_feature 1..50: note = Synthetic Primer
  misc_difference 21..23: note = n is a, c, g, t or u
  misc_difference 27..29: note = n is a, c, g, t or u
  modified_base 20: mod_base = OTHER; note = uracil
  modified_base 33: mod_base = OTHER; note = uracil
  modified_base 42..43: mod_base = OTHER; note = uracil
  modified_base 49: mod_base = OTHER; note = uracil
  source 1..50: mol_type = other DNA
tctgtacggtgacaaggcgtnnnactnnntgatagccgaccttgaggctg

SEQ ID NO: 54 - DNA, 50 bp, synthetic construct
  misc_feature 1..50: note = Synthetic Primer
  misc_difference 21..23: note = n is a, c, g, t or u
  misc_difference 27..29: note = n is a, c, g, t or u
  modified_base 20: mod_base = OTHER; note = uracil
  modified_base 33: mod_base = OTHER; note = uracil
  modified_base 37: mod_base = OTHER; note = uracil
  modified_base 39: mod_base = OTHER; note = uracil
  modified_base 42: mod_base = OTHER; note = uracil
  source 1..50: mol_type = other DNA
tctgtacggtgacaaggcgtnnnactnnntgatccctctcatgcccgcag

SEQ ID NO: 55 - DNA, 50 bp, synthetic construct
  misc_feature 1..50: note = Synthetic Primer
  misc_difference 21..23: note = n is a, c, g, t or u
  misc_difference 27..29: note = n is a, c, g, t or u
  modified_base 20: mod_base = OTHER; note = uracil
  modified_base 33: mod_base = OTHER; note = uracil
  modified_base 35: mod_base = OTHER; note = uracil
  modified_base 41: mod_base = OTHER; note = uracil
  modified_base 47: mod_base = OTHER; note = uracil
  source 1..50: mol_type = other DNA
tctgtacggtgacaaggcgtnnnactnnntgatgtcccagtggccctcgg

SEQ ID NO: 56 - DNA, 50 bp, synthetic construct
  misc_feature 1..50: note = Synthetic Primer
  misc_difference 21..23: note = n is a, c, g, t or u
  misc_difference 27..29: note = n is a, c, g, t or u
  modified_base 20: mod_base = OTHER; note = uracil
  modified_base 33: mod_base = OTHER; note = uracil
  modified_base 42: mod_base = OTHER; note = uracil
  modified_base 46: mod_base = OTHER; note = uracil
  source 1..50: mol_type = other DNA
tctgtacggtgacaaggcgtnnnactnnntgatgaggccactgggtcacc

SEQ ID NO: 57 - DNA, 50 bp, synthetic construct
  misc_feature 1..50: note = Synthetic Primer
  misc_difference 21..23: note = n is a, c, g, t or u
  misc_difference 27..29: note = n is a, c, g, t or u
  modified_base 20: mod_base = OTHER; note = uracil
  modified_base 33: mod_base = OTHER; note = uracil
  modified_base 35: mod_base = OTHER; note = uracil
  modified_base 41: mod_base = OTHER; note = uracil
  source 1..50: mol_type = other DNA
tctgtacggtgacaaggcgtnnnactnnntgatctggagatggcccgaca

SEQ ID NO: 58 - DNA, 50 bp, synthetic construct
  misc_feature 1..50: note = Synthetic Primer
  misc_difference 21..23: note = n is a, c, g, t or u
  misc_difference 27..29: note = n is a, c, g, t or u
  modified_base 20: mod_base = OTHER; note = uracil
  modified_base 33: mod_base = OTHER; note = uracil
  modified_base 39: mod_base = OTHER; note = uracil
  modified_base 41: mod_base = OTHER; note = uracil
  modified_base 44: mod_base = OTHER; note = uracil
  source 1..50: mol_type = other DNA
tctgtacggtgacaaggcgtnnnactnnntgatcaccgtctcctcggagc

SEQ ID NO: 59 - DNA, 50 bp, synthetic construct
  misc_feature 1..50: note = Synthetic Primer
  misc_difference 21..23: note = n is a, c, g, t or u
  misc_difference 27..29: note = n is a, c, g, t or u
  modified_base 20: mod_base = OTHER; note = uracil
  modified_base 33: mod_base = OTHER; note = uracil
  modified_base 35: mod_base = OTHER; note = uracil
  modified_base 38: mod_base = OTHER; note = uracil
  source 1..50: mol_type = other DNA
tctgtacggtgacaaggcgtnnnactnnntgatgtgctcccagcaagcga

SEQ ID NO: 60 - DNA, 50 bp, synthetic construct
  misc_feature 1..50: note = Synthetic Primer
  misc_difference 21..23: note = n is a, c, g, t or u
  misc_difference 27..29: note = n is a, c, g, t or u
  modified_base 20: mod_base = OTHER; note = uracil
  modified_base 33: mod_base = OTHER; note = uracil
  modified_base 35: mod_base = OTHER; note = uracil
  modified_base 43: mod_base = OTHER; note = uracil
  modified_base 46: mod_base = OTHER; note = uracil
  source 1..50: mol_type = other DNA
tctgtacggtgacaaggcgtnnnactnnntgatatcaccgcatcgtgcag

SEQ ID NO: 61 - DNA, 50 bp, synthetic construct
  misc_feature 1..50: note = Synthetic Primer
  misc_difference 21..23: note = n is a, c, g, t or u
  misc_difference 27..29: note = n is a, c, g, t or u
  modified_base 20: mod_base = OTHER; note = uracil
  modified_base 33: mod_base = OTHER; note = uracil
  modified_base 35: mod_base = OTHER; note = uracil
  modified_base 40: mod_base = OTHER; note = uracil
  modified_base 43: mod_base = OTHER; note = uracil
  source 1..50: mol_type = other DNA
tctgtacggtgacaaggcgtnnnactnnntgatatccgctcgtccaccag

SEQ ID NO: 62 - DNA, 50 bp, synthetic construct
  misc_feature 1..50: note = Synthetic Primer
  misc_difference 21..23: note = n is a, c, g, t or u
  misc_difference 27..29: note = n is a, c, g, t or u
  modified_base 20: mod_base = OTHER; note = uracil
  modified_base 33: mod_base = OTHER; note = uracil
  modified_base 36: mod_base = OTHER; note = uracil
  modified_base 47: mod_base = OTHER; note = uracil
  source 1..50: mol_type = other DNA
tctgtacggtgacaaggcgtnnnactnnntgatgctcgcccacgagtagc

SEQ ID NO: 63 - DNA, 50 bp, synthetic construct
  misc_feature 1..50: note = Synthetic Primer
  misc_difference 21..23: note = n is a, c, g, t or u
  misc_difference 27..29: note = n is a, c, g, t or u
  modified_base 20: mod_base = OTHER; note = uracil
  modified_base 33: mod_base = OTHER; note = uracil
  modified_base 44: mod_base = OTHER; note = uracil
  modified_base 47: mod_base = OTHER; note = uracil
  source 1..50: mol_type = other DNA
tctgtacggtgacaaggcgtnnnactnnntgatcagcgccacctgctgac

SEQ ID NO: 64 - DNA, 50 bp, synthetic construct
  misc_feature 1..50: note = Synthetic Primer
  misc_difference 21..23: note = n is a, c, g, t or u
  misc_difference 27..29: note = n is a, c, g, t or u
  modified_base 20: mod_base = OTHER; note = uracil
  modified_base 33: mod_base = OTHER; note = uracil
  modified_base 39: mod_base = OTHER; note = uracil
  modified_base 41: mod_base = OTHER; note = uracil
  modified_base 47: mod_base = OTHER; note = uracil
  source 1..50: mol_type = other DNA
tctgtacggtgacaaggcgtnnnactnnntgatccgcctctcaccatcga

SEQ ID NO: 65 - DNA, 50 bp, synthetic construct
  misc_feature 1..50: note = Synthetic Primer
  misc_difference 21..23: note = n is a, c, g, t or u
  misc_difference 27..29: note = n is a, c, g, t or u
  modified_base 20: mod_base = OTHER; note = uracil
  modified_base 33: mod_base = OTHER; note = uracil
  modified_base 35: mod_base = OTHER; note = uracil
  modified_base 49: mod_base = OTHER; note = uracil
  source 1..50: mol_type = other DNA
tctgtacggtgacaaggcgtnnnactnnntgatctcgagcccgggaagtg

SEQ ID NO: 66 - DNA, 50 bp, synthetic construct
  misc_feature 1..50: note = Synthetic Primer
  misc_difference 21..23: note = n is a, c, g, t or u
  misc_difference 27..29: note = n is a, c, g, t or u
  modified_base 20: mod_base = OTHER; note = uracil
  modified_base 33: mod_base = OTHER; note = uracil
  modified_base 39: mod_base = OTHER; note = uracil
  modified_base 43: mod_base = OTHER; note = uracil
  source 1..50: mol_type = other DNA
tctgtacggtgacaaggcgtnnnactnnntgatgggactcgatggaccgc

SEQ ID NO: 67 - DNA, 50 bp, synthetic construct
  misc_feature 1..50: note = Synthetic Primer
  misc_difference 21..23: note = n is a, c, g, t or u
  misc_difference 27..29: note = n is a, c, g, t or u
  modified_base 20: mod_base = OTHER; note = uracil
  modified_base 33..34: mod_base = OTHER; note = uracil
  modified_base 37: mod_base = OTHER; note = uracil
  modified_base 41: mod_base = OTHER; note = uracil
  modified_base 45: mod_base = OTHER; note = uracil
  modified_base 49: mod_base = OTHER; note = uracil
  source 1..50: mol_type = other DNA
tctgtacggtgacaaggcgtnnnactnnntgattactgcctggctggctg

SEQ ID NO: 68 - DNA, 50 bp, synthetic construct
  misc_feature 1..50: note = Synthetic Primer
  misc_difference 21..23: note = n is a, c, g, t or u
  misc_difference 27..29: note = n is a, c, g, t or u
  modified_base 20: mod_base = OTHER; note = uracil
  modified_base 33..35: mod_base = OTHER; note = uracil
  modified_base 37: mod_base = OTHER; note = uracil
  source 1..50: mol_type = other DNA
tctgtacggtgacaaggcgtnnnactnnntgatttgtgcccaccaggcaa

SEQ ID NO: 69 - DNA, 50 bp, synthetic construct
  misc_feature 1..50: note = Synthetic Primer
  misc_difference 21..23: note = n is a, c, g, t or u
  misc_difference 27..29: note = n is a, c, g, t or u
  modified_base 20: mod_base = OTHER; note = uracil
  modified_base 33: mod_base = OTHER; note = uracil
  modified_base 36: mod_base = OTHER; note = uracil
  modified_base 38: mod_base = OTHER; note = uracil
  modified_base 41: mod_base = OTHER; note = uracil
  modified_base 48: mod_base = OTHER; note = uracil
  source 1..50: mol_type = other DNA
tctgtacggtgacaaggcgtnnnactnnntgataatctcctgcgccctgg

SEQ ID NO: 70 - DNA, 50 bp, synthetic construct
  misc_feature 1..50: note = Synthetic Primer
  misc_difference 21..23: note = n is a, c, g, t or u
  misc_difference 27..29: note = n is a, c, g, t or u
  modified_base 20: mod_base = OTHER; note = uracil
  modified_base 33: mod_base = OTHER; note = uracil
  modified_base 35: mod_base = OTHER; note = uracil
  modified_base 38..39: mod_base = OTHER; note = uracil
  modified_base 42: mod_base = OTHER; note = uracil
  source 1..50: mol_type = other DNA
tctgtacggtgacaaggcgtnnnactnnntgatctgattgctccggccgt

SEQ ID NO: 71 - DNA, 50 bp, synthetic construct
  misc_feature 1..50: note = Synthetic Primer
  misc_difference 21..23: note = n is a, c, g, t or u
  misc_difference 27..29: note = n is a, c, g, t or u
  modified_base 20: mod_base = OTHER; note = uracil
  modified_base 33: mod_base = OTHER; note = uracil
  modified_base 35: mod_base = OTHER; note = uracil
  modified_base 44: mod_base = OTHER; note = uracil
  source 1..50: mol_type = other DNA
tctgtacggtgacaaggcgtnnnactnnntgatctggaggcactgaggcg

SEQ ID NO: 72 - DNA, 50 bp, synthetic construct
  misc_feature 1..50: note = Synthetic Primer
  misc_difference 21..23: note = n is a, c, g, t or u
  misc_difference 27..29: note = n is a, c, g, t or u
  modified_base 20: mod_base = OTHER; note = uracil
  modified_base 33: mod_base = OTHER; note = uracil
  modified_base 35: mod_base = OTHER; note = uracil
  modified_base 42: mod_base = OTHER; note = uracil
  source 1..50: mol_type = other DNA
tctgtacggtgacaaggcgtnnnactnnntgatctccgccatgcaaggct

SEQ ID NO: 73 - DNA, 50 bp, synthetic construct
  misc_feature 1..50: note = Synthetic Primer
  misc_difference 21..23: note = n is a, c, g, t or u
  misc_difference 27..29: note = n is a, c, g, t or u
  modified_base 20: mod_base = OTHER; note = uracil
  modified_base 33: mod_base = OTHER; note = uracil
  modified_base 36: mod_base = OTHER; note = uracil
  modified_base 49: mod_base = OTHER; note = uracil
  source 1..50: mol_type = other DNA
tctgtacggtgacaaggcgtnnnactnnntgatggtccagggagagcctg

SEQ ID NO: 74 - DNA, 50 bp, synthetic construct
  misc_feature 1..50: note = Synthetic Primer
  misc_difference 21..23: note = n is a, c, g, t or u
  misc_difference 27..29: note = n is a, c, g, t or u
  modified_base 20: mod_base = OTHER; note = uracil
  modified_base 33: mod_base = OTHER; note = uracil
  modified_base 35: mod_base = OTHER; note = uracil
  modified_base 41: mod_base = OTHER; note = uracil
  source 1..50: mol_type = other DNA
tctgtacggtgacaaggcgtnnnactnnntgatgtccgactccgaggacg

SEQ ID NO: 75 - DNA, 50 bp, synthetic construct
  misc_feature 1..50: note = Synthetic Primer
  misc_difference 21..23: note = n is a, c, g, t or u
  misc_difference 27..29: note = n is a, c, g, t or u
  modified_base 20: mod_base = OTHER; note = uracil
  modified_base 33: mod_base = OTHER; note = uracil
  modified_base 35: mod_base = OTHER; note = uracil
  modified_base 38: mod_base = OTHER; note = uracil
  source 1..50: mol_type = other DNA
tctgtacggtgacaaggcgtnnnactnnntgatctgctgcagaacgggag

SEQ ID NO: 76 - DNA, 50 bp, synthetic construct
  misc_feature 1..50: note = Synthetic Primer
  misc_difference 21..23: note = n is a, c, g, t or u
  misc_difference 27..29: note = n is a, c, g, t or u
  modified_base 20: mod_base = OTHER; note = uracil
  modified_base 33..34: mod_base = OTHER; note = uracil
  modified_base 36: mod_base = OTHER; note = uracil
  modified_base 39..40: mod_base = OTHER; note = uracil
  modified_base 45..46: mod_base = OTHER; note = uracil
  source 1..50: mol_type = other DNA
tctgtacggtgacaaggcgtnnnactnnntgattgtcgttccgcttcggg

SEQ ID NO: 77 - DNA, 50 bp, synthetic construct
  misc_feature 1..50: note = Synthetic Primer
  misc_difference 21..23: note = n is a, c, g, t or u
  misc_difference 27..29: note = n is a, c, g, t or u
  modified_base 20: mod_base = OTHER; note = uracil
  modified_base 33..34: mod_base = OTHER; note = uracil
  modified_base 46: mod_base = OTHER; note = uracil
  modified_base 49: mod_base = OTHER; note = uracil
  source 1..50: mol_type = other DNA
tctgtacggtgacaaggcgtnnnactnnntgattccagcaaggcctggtg

SEQ ID NO: 78 - DNA, 50 bp, synthetic construct
  misc_feature 1..50: note = Synthetic Primer
  misc_difference 21..23: note = n is a, c, g, t or u
  misc_difference 27..29: note = n is a, c, g, t or u
  modified_base 20: mod_base = OTHER; note = uracil
  modified_base 33: mod_base = OTHER; note = uracil
  modified_base 36: mod_base = OTHER; note = uracil
  modified_base 40..42: mod_base = OTHER; note = uracil
  source 1..50: mol_type = other DNA
tctgtacggtgacaaggcgtnnnactnnntgatgctagctttggcgaggg

SEQ ID NO: 79 - DNA, 50 bp, synthetic construct
  misc_feature 1..50: note = Synthetic Primer
  misc_difference 21..23: note = n is a, c, g, t or u
  misc_difference 27..29: note = n is a, c, g, t or u
  modified_base 20: mod_base = OTHER; note = uracil
  modified_base 33..34: mod_base = OTHER; note = uracil
  modified_base 39..40: mod_base = OTHER; note = uracil
  modified_base 45: mod_base = OTHER; note = uracil
  source 1..50: mol_type = other DNA
tctgtacggtgacaaggcgtnnnactnnntgattgagcttgccctgaccc

SEQ ID NO: 80 - DNA, 50 bp, synthetic construct
  misc_feature 1..50: note = Synthetic Primer
  misc_difference 21..23: note = n is a, c, g, t or u
  misc_difference 27..29: note = n is a, c, g, t or u
  modified_base 20: mod_base = OTHER; note = uracil
  modified_base 33: mod_base = OTHER; note = uracil
  modified_base 35: mod_base = OTHER; note = uracil
  modified_base 44: mod_base = OTHER; note = uracil
  modified_base 49: mod_base = OTHER; note = uracil
  source 1..50: mol_type = other DNA
tctgtacggtgacaaggcgtnnnactnnntgatatgagggcgatgggctg

SEQ ID NO: 81 - DNA, 50 bp, synthetic construct
  misc_feature 1..50: note = Synthetic Primer
  misc_difference 21..23: note = n is a, c, g, t or u
  misc_difference 27..29: note = n is a, c, g, t or u
  modified_base 20: mod_base = OTHER; note = uracil
  modified_base 33: mod_base = OTHER; note = uracil
  modified_base 37: mod_base = OTHER; note = uracil
  modified_base 42: mod_base = OTHER; note = uracil
  modified_base 46: mod_base = OTHER; note = uracil
  source 1..50: mol_type = other DNA
tctgtacggtgacaaggcgtnnnactnnntgatcagtgagctgcctgcgt

SEQ ID NO: 82 - DNA, 50 bp, synthetic construct
  misc_feature 1..50: note = Synthetic Primer
  misc_difference 21..23: note = n is a, c, g, t or u
  misc_difference 27..29: note = n is a, c, g, t or u
  modified_base 20: mod_base = OTHER; note = uracil
  modified_base 33: mod_base = OTHER; note = uracil
  modified_base 35: mod_base = OTHER; note = uracil
  modified_base 44: mod_base = OTHER; note = uracil
  modified_base 47: mod_base = OTHER; note = uracil
  source 1..50: mol_type = other DNA
tctgtacggtgacaaggcgtnnnactnnntgatctgcggcgagtcctgag

SEQ ID NO: 83 - DNA, 50 bp, synthetic construct
  misc_feature 1..50: note = Synthetic Primer
  misc_difference 21..23: note = n is a, c, g, t or u
  misc_difference 27..29: note = n is a, c, g, t or u
  modified_base 20: mod_base = OTHER; note = uracil
  modified_base 33..34: mod_base = OTHER; note = uracil
  modified_base 38: mod_base = OTHER; note = uracil
  modified_base 44: mod_base = OTHER; note = uracil
  source 1..50: mol_type = other DNA
tctgtacggtgacaaggcgtnnnactnnntgattggctccgggtgacagc

SEQ ID NO: 84 - DNA, 50 bp, synthetic construct
  misc_feature 1..50: note = Synthetic Primer
  misc_difference 21..23: note = n is a, c, g, t or u
  misc_difference 27..29: note = n is a, c, g, t or u
  modified_base 20: mod_base = OTHER; note = uracil
  modified_base 33: mod_base = OTHER; note = uracil
  modified_base 43: mod_base = OTHER; note = uracil
  modified_base 48: mod_base = OTHER; note = uracil
  source 1..50: mol_type = other DNA
tctgtacggtgacaaggcgtnnnactnnntgatagagcggactcccctcg

SEQ ID NO: 85 - DNA, 50 bp, synthetic construct
  misc_feature 1..50: note = Synthetic Primer
  misc_difference 21..23: note = n is a, c, g, t or u
  misc_difference 27..29: note = n is a, c, g, t or u
  modified_base 20: mod_base = OTHER; note = uracil
  modified_base 33: mod_base = OTHER; note = uracil
  modified_base 35: mod_base = OTHER; note = uracil
  modified_base 42: mod_base = OTHER; note = uracil
  source 1..50: mol_type = other DNA
tctgtacggtgacaaggcgtnnnactnnntgatgtccagcatccgaccac

SEQ ID NO: 86 - DNA, 50 bp, synthetic construct
  misc_feature 1..50: note = Synthetic Primer
  misc_difference 21..23: note = n is a, c, g, t or u
  misc_difference 27..29: note = n is a, c, g, t or u
  modified_base 20: mod_base = OTHER; note = uracil
  modified_base 33: mod_base = OTHER; note = uracil
  modified_base 35: mod_base = OTHER; note = uracil
  modified_base 39: mod_base = OTHER; note = uracil
  modified_base 42: mod_base = OTHER; note = uracil
  modified_base 44: mod_base = OTHER; note = uracil
  modified_base 46: mod_base = OTHER; note = uracil
  source 1..50: mol_type = other DNA
tctgtacggtgacaaggcgtnnnactnnntgatgtccctgctgtctgccg

SEQ ID NO: 87 - DNA, 50 bp, synthetic construct
  misc_feature 1..50: note = Synthetic Primer
  misc_difference 21..23: note = n is a, c, g, t or u
  misc_difference 27..29: note = n is a, c, g, t or u
  modified_base 20: mod_base = OTHER; note = uracil
  modified_base 33: mod_base = OTHER; note = uracil
  modified_base 37: mod_base = OTHER; note = uracil
  modified_base 45: mod_base = OTHER; note = uracil
  source 1..50: mol_type = other DNA
tctgtacggtgacaaggcgtnnnactnnntgatagatgcagccgtgccag

SEQ ID NO: 88 - DNA, 50 bp, synthetic construct
  misc_feature 1..50: note = Synthetic Primer
  misc_difference 21..23: note = n is a, c, g, t or u
  misc_difference 27..29: note = n is a, c, g, t or u
  modified_base 20: mod_base = OTHER; note = uracil
  modified_base 33: mod_base = OTHER; note = uracil
  modified_base 36: mod_base = OTHER; note = uracil
  source 1..50: mol_type = other DNA
tctgtacggtgacaaggcgtnnnactnnntgatgctcggcagccgcagaa

SEQ ID NO: 89 - DNA, 50 bp, synthetic construct
  misc_feature 1..50: note = Synthetic Primer
  misc_difference 21..23: note = n is a, c, g, t or u
  misc_difference 27..29: note = n is a, c, g, t or u
  modified_base 20: mod_base = OTHER; note = uracil
  modified_base 33: mod_base = OTHER; note = uracil
  modified_base 35: mod_base = OTHER; note = uracil
  modified_base 44: mod_base = OTHER; note = uracil
  source 1..50: mol_type = other DNA
tctgtacggtgacaaggcgtnnnactnnntgatctccaggaggtggaggg

SEQ ID NO: 90 - DNA, 50 bp, synthetic construct
  misc_feature 1..50: note = Synthetic Primer
  misc_difference 21..23: note = n is a, c, g, t or u
  misc_difference 27..29: note = n is a, c, g, t or u
  modified_base 20: mod_base = OTHER; note = uracil
  modified_base 33..35: mod_base = OTHER; note = uracil
  modified_base 38: mod_base = OTHER; note = uracil
  source 1..50: mol_type = other DNA
tctgtacggtgacaaggcgtnnnactnnntgatttcctgagccagcaggg

SEQ ID NO: 91 - DNA, 50 bp, synthetic construct
  misc_feature 1..50: note = Synthetic Primer
  misc_difference 21..23: note = n is a, c, g, t or u
  misc_difference 27..29: note = n is a, c, g, t or u
  modified_base 20: mod_base = OTHER; note = uracil
  modified_base 33: mod_base = OTHER; note = uracil
  modified_base 35: mod_base = OTHER; note = uracil
  modified_base 39..40: mod_base = OTHER; note = uracil
  source 1..50: mol_type = other DNA
tctgtacggtgacaaggcgtnnnactnnntgatctccattcccgggaggg

SEQ ID NO: 92 - DNA, 50 bp, synthetic construct
  misc_feature 1..50: note = Synthetic Primer
  misc_difference 21..23: note = n is a, c, g, t or u
  misc_difference 27..29: note = n is a, c, g, t or u
  modified_base 20: mod_base = OTHER; note = uracil
  modified_base 33: mod_base = OTHER; note = uracil
  modified_base 38: mod_base = OTHER; note = uracil
  modified_base 44: mod_base = OTHER; note = uracil
  source 1..50: mol_type = other DNA
tctgtacggtgacaaggcgtnnnactnnntgataggctccacctcagcag

SEQ ID NO: 93 - DNA, 50 bp, synthetic construct
  misc_feature 1..50: note = Synthetic Primer
  misc_difference 21..23: note = n is a, c, g, t or u
  misc_difference 27..29: note = n is a, c, g, t or u
  modified_base 20: mod_base = OTHER; note = uracil
  modified_base 33: mod_base = OTHER; note = uracil
  modified_base 35: mod_base = OTHER; note = uracil
  modified_base 40: mod_base = OTHER; note = uracil
  modified_base 49: mod_base = OTHER; note = uracil
  source 1..50: mol_type = other DNA
tctgtacggtgacaaggcgtnnnactnnntgatctgaagtcagccggctc

SEQ ID NO: 94 - DNA, 50 bp, synthetic construct
  misc_feature 1..50: note = Synthetic Primer
  misc_difference 21..23: note = n is a, c, g, t or u
  misc_difference 27..29: note = n is a, c, g, t or u
  modified_base 20: mod_base = OTHER; note = uracil
  modified_base 33: mod_base = OTHER; note = uracil
  modified_base 44..45: mod_base = OTHER; note = uracil
  modified_base 47: mod_base = OTHER; note = uracil
  source 1..50: mol_type = other DNA
tctgtacggtgacaaggcgtnnnactnnntgatccaggacgccttctgca

SEQ ID NO: 95 - DNA, 50 bp, synthetic construct
  misc_feature 1..50: note = Synthetic Primer
  misc_difference 21..23: note = n is a, c, g, t or u
  misc_difference 27..29: note = n is a, c, g, t or u
  modified_base 20: mod_base = OTHER; note = uracil
  modified_base 33: mod_base = OTHER; note = uracil
  modified_base 35: mod_base = OTHER; note = uracil
  modified_base 44: mod_base = OTHER; note = uracil
  source 1..50: mol_type = other DNA
tctgtacggtgacaaggcgtnnnactnnntgatatgcccaggctgggaag

SEQ ID NO: 96 - DNA, 50 bp, synthetic construct
  misc_feature 1..50: note = Synthetic Primer
  misc_difference 21..23: note = n is a, c, g, t or u
  misc_difference 27..29: note = n is a, c, g, t or u
  modified_base 20: mod_base = OTHER; note = uracil
  modified_base 33: mod_base = OTHER; note = uracil
  modified_base 36: mod_base = OTHER; note = uracil
  modified_base 47: mod_base = OTHER; note = uracil
  source 1..50: mol_type = other DNA
tctgtacggtgacaaggcgtnnnactnnntgatcctcaccacgagctgcc

SEQ ID NO: 97 - DNA, 50 bp, synthetic construct
  misc_feature 1..50: note = Synthetic Primer
  misc_difference 21..23: note = n is a, c, g, t or u
  misc_difference 27..29: note = n is a, c, g, t or u
  modified_base 20: mod_base = OTHER; note = uracil
  modified_base 33: mod_base = OTHER; note = uracil
  modified_base 36: mod_base = OTHER; note = uracil
  modified_base 48: mod_base = OTHER; note = uracil
  source 1..50: mol_type = other DNA
tctgtacggtgacaaggcgtnnnactnnntgatgctggaccagaccctgc

SEQ ID NO: 98 - DNA, 50 bp, synthetic construct
  misc_feature 1..50: note = Synthetic Primer
  misc_difference 21..23: note = n is a, c, g, t or u
  misc_difference 27..29: note = n is a, c, g, t or u
  modified_base 20: mod_base = OTHER; note = uracil
  modified_base 33: mod_base = OTHER; note = uracil
  modified_base 36: mod_base = OTHER; note = uracil
  modified_base 40: mod_base = OTHER; note = uracil
  modified_base 46: mod_base = OTHER; note = uracil
  modified_base 48: mod_base = OTHER; note = uracil
  source 1..50: mol_type = other DNA
tctgtacggtgacaaggcgtnnnactnnntgatcatgagtcggcctgtgg

SEQ ID NO: 99 - DNA, 50 bp, synthetic construct
  misc_feature 1..50: note = Synthetic Primer
  misc_difference 21..23: note = n is a, c, g, t or u
  misc_difference 27..29: note = n is a, c, g, t or u
  modified_base 20: mod_base = OTHER; note = uracil
  modified_base 33: mod_base = OTHER; note = uracil
  modified_base 41..42: mod_base = OTHER; note = uracil
  modified_base 49: mod_base = OTHER; note = uracil
  source 1..50: mol_type = other DNA
tctgtacggtgacaaggcgtnnnactnnntgatcccacccttccgacctc

SEQ ID NO: 100 - DNA, 50 bp, synthetic construct
  misc_feature 1..50: note = Synthetic Primer
  misc_difference 21..23: note = n is a, c, g, t or u
  misc_difference 27..29: note = n is a, c, g, t or u
  modified_base 20: mod_base = OTHER; note = uracil
  modified_base 33..34: mod_base = OTHER; note = uracil
  modified_base 36..37: mod_base = OTHER; note = uracil
  modified_base 44: mod_base = OTHER; note = uracil
  source 1..50: mol_type = other DNA
tctgtacggtgacaaggcgtnnnactnnntgattcttcccgggtcccgag

SEQ ID NO: 101 - DNA, 50 bp, synthetic construct
  misc_feature 1..50: note = Synthetic Primer
  misc_difference 21..23: note = n is a, c, g, t or u
  misc_difference 27..29: note = n is a, c, g, t or u
  modified_base 20: mod_base = OTHER; note = uracil
  modified_base 33: mod_base = OTHER; note = uracil
  modified_base 37: mod_base = OTHER; note = uracil
  source 1..50: mol_type = other DNA
tctgtacggtgacaaggcgtnnnactnnntgatcggtgggcagccaggag

SEQ ID NO: 102 - DNA, 50 bp, synthetic construct
  misc_feature 1..50: note = Synthetic Primer
  misc_difference 21..23: note = n is a, c, g, t or u
  misc_difference 27..29: note = n is a, c, g, t or u
  modified_base 20: mod_base = OTHER; note = uracil
  modified_base 33: mod_base = OTHER; note = uracil
  modified_base 42: mod_base = OTHER; note = uracil
  modified_base 44: mod_base = OTHER; note = uracil
  source 1..50: mol_type = other DNA
tctgtacggtgacaaggcgtnnnactnnntgatcccgcacgtgtgaaggc

SEQ ID NO: 103 - DNA, 50 bp, synthetic construct
  misc_feature 1..50: note = Synthetic Primer
  misc_difference 21..23: note = n is a, c, g, t or u
  misc_difference 27..29: note = n is a, c, g, t or u
  modified_base 20: mod_base = OTHER; note = uracil
  modified_base 33: mod_base = OTHER; note = uracil
  modified_base 35: mod_base = OTHER; note = uracil
  modified_base 39: mod_base = OTHER; note = uracil
  source 1..50: mol_type = other DNA
tctgtacggtgacaaggcgtnnnactnnntgatatgagtgggcaggaggc

SEQ ID NO: 104 - DNA, 50 bp, synthetic construct
  misc_feature 1..50: note = Synthetic Primer
  misc_difference 21..23: note = n is a, c, g, t or u
  misc_difference 27..29: note = n is a, c, g, t or u
  modified_base 20: mod_base = OTHER; note = uracil
  modified_base 33: mod_base = OTHER; note = uracil
  modified_base 38: mod_base = OTHER; note = uracil
  modified_base 49: mod_base = OTHER; note = uracil
  source 1..50: mol_type = other DNA
tctgtacggtgacaaggcgtnnnactnnntgatccagtggaggccggatg

SEQ ID NO: 105 - DNA, 50 bp, synthetic construct
  misc_feature 1..50: note = Synthetic Primer
  misc_difference 21..23: note = n is a, c, g, t or u
  misc_difference 27..29: note = n is a, c, g, t or u
  modified_base 20: mod_base = OTHER; note = uracil
  modified_base 33: mod_base = OTHER; note = uracil
  modified_base 37: mod_base = OTHER; note = uracil
  modified_base 45: mod_base = OTHER; note = uracil
  source 1..50: mol_type = other DNA
tctgtacggtgacaaggcgtnnnactnnntgatccctcgggcagtgacac

SEQ ID NO: 106 - DNA, 50 bp, synthetic construct
  misc_feature 1..50: note = Synthetic Primer
  misc_difference 21..23: note = n is a, c, g, t or u
  misc_difference 27..29: note = n is a, c, g, t or u
  modified_base 20: mod_base = OTHER; note = uracil
  modified_base 33: mod_base = OTHER; note = uracil
  modified_base 40: mod_base = OTHER; note = uracil
  modified_base 48..49: mod_base = OTHER; note = uracil
  source 1..50: mol_type = other DNA
tctgtacggtgacaaggcgtnnnactnnntgatgagccgtgcagcgattg

SEQ ID NO: 107 - DNA, 50 bp, synthetic construct
  misc_feature 1..50: note = Synthetic Primer
  misc_difference 21..23: note = n is a, c, g, t or u
  misc_difference 27..29: note = n is a, c, g, t or u
  modified_base 20: mod_base = OTHER; note = uracil
  modified_base 33: mod_base = OTHER; note = uracil
  modified_base 40: mod_base = OTHER; note = uracil
  modified_base 42: mod_base = OTHER; note = uracil
  modified_base 45..46: mod_base = OTHER; note = uracil
  modified_base 49: mod_base = OTHER; note = uracil
  source 1..50: mol_type = other DNA
tctgtacggtgacaaggcgtnnnactnnntgatgcccactgtgcttcctc

SEQ ID NO: 108 - DNA, 50 bp, synthetic construct
  misc_feature 1..50: note = Synthetic Primer
  misc_difference 21..23: note = n is a, c, g, t or u
  misc_difference 27..29: note = n is a, c, g, t or u
  modified_base 20: mod_base = OTHER; note = uracil
  modified_base 33: mod_base = OTHER; note = uracil
  modified_base 36..37: mod_base = OTHER; note = uracil
  modified_base 49: mod_base = OTHER; note = uracil
  source 1..50: mol_type = other DNA
tctgtacggtgacaaggcgtnnnactnnntgatcgttcgcgcacacccta

SEQ ID NO: 109 - DNA, 50 bp, synthetic construct
  misc_feature 1..50: note = Synthetic Primer
  misc_difference 21..23: note = n is a, c, g, t or u
  misc_difference 27..29: note = n is a, c, g, t or u
  modified_base 20: mod_base = OTHER; note = uracil
  modified_base 33: mod_base = OTHER; note = uracil
  modified_base 35: mod_base = OTHER; note = uracil
  modified_base 39: mod_base = OTHER; note = uracil
  modified_base 41: mod_base = OTHER; note = uracil
  modified_base 44: mod_base = OTHER; note = uracil
  modified_base 46..47: mod_base = OTHER; note = uracil
  source 1..50: mol_type = other DNA
tctgtacggtgacaaggcgtnnnactnnntgatctgcgtctgctgttgct

SEQ ID NO: 110 - DNA, 50 bp, synthetic construct
  misc_feature 1..50: note = Synthetic Primer
  misc_difference 21..23: note = n is a, c, g, t or u
  misc_difference 27..29: note = n is a, c, g, t or u
  modified_base 20: mod_base = OTHER; note = uracil
  modified_base 33: mod_base = OTHER; note = uracil
  modified_base 45..46: mod_base = OTHER; note = uracil
  modified_base 49: mod_base = OTHER; note = uracil
  source 1..50: mol_type = other DNA
tctgtacggtgacaaggcgtnnnactnnntgatccaacggcagcttcgtg

SEQ ID NO: 111 - DNA, 51 bp, synthetic construct
  misc_feature 1..51: note = Synthetic Primer
  misc_difference 21..23: note = n is a, c, g, t or u
  misc_difference 27..29: note = n is a, c, g, t or u
  modified_base 20: mod_base = OTHER; note = uracil
  modified_base 33: mod_base = OTHER; note = uracil
  modified_base 38: mod_base = OTHER; note = uracil
  modified_base 41: mod_base = OTHER; note = uracil
  modified_base 48: mod_base = OTHER; note = uracil
  source 1..51: mol_type = other DNA
tctgtacggtgacaaggcgtnnnactnnntgatgagctggtggaggctgac

SEQ ID NO: 112 - DNA, 51 bp, synthetic construct
  misc_feature 1..51: note = Synthetic Primer
  misc_difference 21..23: note = n is a, c, g, t or u
  misc_difference 27..29: note = n is a, c, g, t or u
  modified_base 20: mod_base = OTHER; note = uracil
  modified_base 33: mod_base = OTHER; note = uracil
  modified_base 36: mod_base = OTHER; note = uracil
  modified_base 42: mod_base = OTHER; note = uracil
  modified_base 47: mod_base = OTHER; note = uracil
  source 1..51: mol_type = other DNA
tctgtacggtgacaaggcgtnnnactnnntgatgctgcccgtgaagtggat

SEQ ID NO: 113 - DNA, 51 bp, synthetic construct
  misc_feature 1..51: note = Synthetic Primer
  misc_difference 21..23: note = n is a, c, g, t or u
  misc_difference 27..29: note = n is a, c, g, t or u
  modified_base 20: mod_base = OTHER; note = uracil
  modified_base 33: mod_base = OTHER; note = uracil
  modified_base 37: mod_base = OTHER; note = uracil
  modified_base 43: mod_base = OTHER; note = uracil
  modified_base 46..47: mod_base = OTHER; note = uracil
  source 1..51: mol_type = other DNA
tctgtacggtgacaaggcgtnnnactnnntgatacctgcaactgcttccct

SEQ ID NO: 114 - DNA, 51 bp, synthetic construct
  misc_feature 1..51: note = Synthetic Primer
  misc_difference 21..23: note = n is a, c, g, t or u
  misc_difference 27..29: note = n is a, c, g, t or u
  modified_base 20: mod_base = OTHER; note = uracil
  modified_base 33: mod_base = OTHER; note = uracil
  modified_base 39: mod_base = OTHER; note = uracil
  modified_base 47..49: mod_base = OTHER; note = uracil
  source 1..51: mol_type = other DNA
tctgtacggtgacaaggcgtnnnactnnntgatgagagtgggcgagtttgc

SEQ ID NO: 115 - DNA, 51 bp, synthetic construct
  misc_feature 1..51: note = Synthetic Primer
  misc_difference 21..23: note = n is a, c, g, t or u
  misc_difference 27..29: note = n is a, c, g, t or u
  modified_base 20: mod_base = OTHER; note = uracil
  modified_base 33..34: mod_base = OTHER; note = uracil
  modified_base 38: mod_base = OTHER; note = uracil
  modified_base 41: mod_base = OTHER; note = uracil
  modified_base 46: mod_base = OTHER; note = uracil
  source 1..51: mol_type = other DNA
tctgtacggtgacaaggcgtnnnactnnntgattggctcctgacctggagt

SEQ ID NO: 116 - DNA, 51 bp, synthetic construct
  misc_feature 1..51: note = Synthetic Primer
  misc_difference 21..23: note = n is a, c, g, t or u
  misc_difference 27..29: note = n is a, c, g, t or u
  modified_base 20: mod_base = OTHER; note = uracil
  modified_base 33: mod_base = OTHER; note = uracil
  modified_base 40: mod_base = OTHER; note = uracil
  modified_base 50: mod_base = OTHER; note = uracil
  source 1..51: mol_type = other DNA
tctgtacggtgacaaggcgtnnnactnnntgataggccctcccagaaggtc

SEQ ID NO: 117 - DNA, 51 bp, synthetic construct
  misc_feature 1..51: note = Synthetic Primer
  misc_difference 21..23: note = n is a, c, g, t or u
  misc_difference 27..29: note = n is a, c, g, t or u
  modified_base 20: mod_base = OTHER; note = uracil
  modified_base 33: mod_base = OTHER; note = uracil
  modified_base 35: mod_base = OTHER; note = uracil
  modified_base 39: mod_base = OTHER; note = uracil
  modified_base 44: mod_base = OTHER; note = uracil
  source 1..51: mol_type = other DNA
tctgtacggtgacaaggcgtnnnactnnntgatctgcctgacatccacggt

SEQ ID NO: 118 - DNA, 51 bp, synthetic construct
  misc_feature 1..51: note = Synthetic Primer
  misc_difference 21..23: note = n is a, c, g, t or u
  misc_difference 27..29: note = n is a, c, g, t or u
  modified_base 20: mod_base = OTHER; note = uracil
  modified_base 33: mod_base = OTHER; note = uracil
  modified_base 39: mod_base = OTHER; note = uracil
  modified_base 42: mod_base = OTHER; note = uracil
  source 1..51: mol_type = other DNA
tctgtacggtgacaaggcgtnnnactnnntgatgggcatggtccaccacag

SEQ ID NO: 119 - DNA, 51 bp, synthetic construct
  misc_feature 1..51: note = Synthetic Primer
  misc_difference 21..23: note = n is a, c, g, t or u
  misc_difference 27..29: note = n is a, c, g, t or u
  modified_base 20: mod_base = OTHER; note = uracil
  modified_base 33: mod_base = OTHER; note = uracil
  modified_base 36: mod_base = OTHER; note = uracil
  modified_base 46: mod_base = OTHER; note = uracil
  modified_base 50: mod_base = OTHER; note = uracil
  source 1..51: mol_type = other DNA
tctgtacggtgacaaggcgtnnnactnnntgatcatggcacagcctccctt

SEQ ID NO: 120 - DNA, 51 bp, synthetic construct
  misc_feature 1..51: note = Synthetic Primer
  misc_difference 21..23: note = n is a, c, g, t or u
  misc_difference 27..29: note = n is a, c, g, t or u
  modified_base 20: mod_base = OTHER; note = uracil
  modified_base 33: mod_base = OTHER; note = uracil
  modified_base 41: mod_base = OTHER; note = uracil
  modified_base 48..50: mod_base = OTHER; note = uracil
  source 1..51: mol_type = other DNA
tctgtacggtgacaaggcgtnnnactnnntgatacacagctgggcgctttg

SEQ ID NO: 121 - DNA, 51 bp, synthetic construct
  misc_feature 1..51: note = Synthetic Primer
  misc_difference 21..23: note = n is a, c, g, t or u
  misc_difference 27..29: note = n is a, c, g, t or u
  modified_base 20: mod_base = OTHER; note = uracil
  modified_base 33..35: mod_base = OTHER; note = uracil
  modified_base 47: mod_base = OTHER; note = uracil
  source 1..51: mol_type = other DNA
tctgtacggtgacaaggcgtnnnactnnntgatttcaggcgccaagtaggt

SEQ ID NO: 122 - DNA, 51 bp, synthetic construct
  misc_feature 1..51: note = Synthetic Primer
  misc_difference 21..23: note = n is a, c, g, t or u
  misc_difference 27..29: note = n is a, c, g, t or u
  modified_base 20: mod_base = OTHER; note = uracil
  modified_base 33: mod_base = OTHER; note = uracil
  modified_base 35: mod_base = OTHER; note = uracil
  modified_base 41: mod_base = OTHER; note = uracil
  modified_base 44: mod_base = OTHER; note = uracil
  source 1..51: mol_type = other DNA
tctgtacggtgacaaggcgtnnnactnnntgatctcaccatgctgcagcac

SEQ ID NO: 123 - DNA, 51 bp, synthetic construct
  misc_feature 1..51: note = Synthetic Primer
  misc_difference 21..23: note = n is a, c, g, t or u
  misc_difference 27..29: note = n is a, c, g, t or u
  modified_base 20: mod_base = OTHER; note = uracil
  modified_base 33..34: mod_base = OTHER; note = uracil
  modified_base 38: mod_base = OTHER; note = uracil
  modified_base 47: mod_base = OTHER; note = uracil
  source 1..51: mol_type = other DNA
tctgtacggtgacaaggcgtnnnactnnntgattagatggacgcactgggc

SEQ ID NO: 124 - DNA, 51 bp, synthetic construct
  misc_feature 1..51: note = Synthetic Primer
  misc_difference 21..23: note = n is a, c, g, t or u
  misc_difference 27..29: note = n is a, c, g, t or u
  modified_base 20: mod_base = OTHER; note = uracil
  modified_base 33: mod_base = OTHER; note = uracil
  modified_base 43: mod_base = OTHER; note = uracil
  modified_base 50: mod_base = OTHER; note = uracil
  source 1..51: mol_type = other DNA
tctgtacggtgacaaggcgtnnnactnnntgataaagccggctacgcgctg

SEQ ID NO: 125 - DNA, 51 bp, synthetic construct
  misc_feature 1..51: note = Synthetic Primer
  misc_difference 21..23: note = n is a, c, g, t or u
  misc_difference 27..29: note = n is a, c, g, t or u
  modified_base 20: mod_base = OTHER; note = uracil
  modified_base 33: mod_base = OTHER; note = uracil
  modified_base 42: mod_base = OTHER; note = uracil
  modified_base 45: mod_base = OTHER; note = uracil
  modified_base 50: mod_base = OTHER; note = uracil
  source 1..51: mol_type = other DNA
tctgtacggtgacaaggcgtnnnactnnntgatccagcccctcctcagatg

SEQ ID NO: 126 - DNA, 51 bp, synthetic construct
  misc_feature 1..51: note = Synthetic Primer
  misc_difference 21..23: note = n is a, c, g, t or u
  misc_difference 27..29: note = n is a, c, g, t or u
  modified_base 20: mod_base = OTHER; note = uracil
  modified_base 33..34: mod_base = OTHER; note = uracil
  modified_base 36: mod_base = OTHER; note = uracil
  modified_base 38: mod_base = OTHER; note = uracil
  modified_base 49: mod_base = OTHER; note = uracil
  source 1..51: mol_type = other DNA
tctgtacggtgacaaggcgtnnnactnnntgattctgtgacaacgggctgc

SEQ ID NO: 127 - DNA, 51 bp, synthetic construct
  misc_feature 1..51: note = Synthetic Primer
  misc_difference 21..23: note = n is a, c, g, t or u
  misc_difference 27..29: note = n is a, c, g, t or u
  modified_base 20: mod_base = OTHER; note = uracil
  modified_base 33: mod_base = OTHER; note = uracil
  modified_base 35: mod_base = OTHER; note = uracil
  modified_base 44: mod_base = OTHER; note = uracil
  source 1..51: mol_type = other DNA
tctgtacggtgacaaggcgtnnnactnnntgatgtggacagcatcgggagc

SEQ ID NO: 128 - DNA, 51 bp, synthetic construct
  misc_feature 1..51: note = Synthetic Primer
  misc_difference 21..23: note = n is a, c, g, t or u
  misc_difference 27..29: note = n is a, c, g, t or u
  modified_base 20: mod_base = OTHER; note = uracil
  modified_base 33: mod_base = OTHER; note = uracil
  modified_base 48: mod_base = OTHER; note = uracil
  source 1..51: mol_type = other DNA
tctgtacggtgacaaggcgtnnnactnnntgatggaacaggagcagctgcg

SEQ ID NO: 129 - DNA, 51 bp, synthetic construct
  misc_feature 1..51: note = Synthetic Primer
  misc_difference 21..23: note = n is a, c, g, t or u
  misc_difference 27..29: note = n is a, c, g, t or u
  modified_base 20: mod_base = OTHER; note = uracil
  modified_base 33: mod_base = OTHER; note = uracil
  modified_base 35: mod_base = OTHER; note = uracil
  modified_base 37: mod_base = OTHER; note = uracil
  modified_base 40: mod_base = OTHER; note = uracil
  modified_base 42: mod_base = OTHER; note = uracil
  modified_base 44: mod_base = OTHER; note = uracil
  source 1..51: mol_type = other DNA
tctgtacggtgacaaggcgtnnnactnnntgatatctcctgtgtgcccaga

SEQ ID NO: 130 - DNA, 51 bp, synthetic construct
  misc_feature 1..51: note = Synthetic Primer
  misc_difference 21..23: note = n is a, c, g, t or u
  misc_difference 27..29: note = n is a, c, g, t or u
  modified_base 20: mod_base = OTHER; note = uracil
  modified_base 33: mod_base = OTHER; note = uracil
  modified_base 41: mod_base = OTHER; note = uracil
  modified_base 44: mod_base = OTHER; note = uracil
  modified_base 47..48: mod_base = OTHER; note = uracil
  source 1..51: mol_type = other DNA
tctgtacggtgacaaggcgtnnnactnnntgatccccaagtcctccttgcc

SEQ ID NO: 131 - DNA, 51 bp, synthetic construct
  misc_feature 1..51: note = Synthetic Primer
  misc_difference 21..23: note = n is a, c, g, t or u
  misc_difference 27..29: note = n is a, c, g, t or u
  modified_base 20: mod_base = OTHER; note = uracil
  modified_base 33: mod_base = OTHER; note = uracil
  modified_base 45: mod_base = OTHER; note = uracil
  modified_base 47: mod_base = OTHER; note = uracil
  modified_base 49: mod_base = OTHER; note = uracil
  source 1..51: mol_type = other DNA
tctgtacggtgacaaggcgtnnnactnnntgatcacagacaggctgtgtgc

SEQ ID NO: 132 - DNA, 51 bp, synthetic construct
  misc_feature 1..51: note = Synthetic Primer
  misc_difference 21..23: note = n is a, c, g, t or u
  misc_difference 27..29: note = n is a, c, g, t or u
  modified_base 20: mod_base = OTHER; note = uracil
  modified_base 33: mod_base = OTHER; note = uracil
  modified_base 35: mod_base = OTHER; note = uracil
  modified_base 38: mod_base = OTHER; note = uracil
  source 1..51: mol_type = other DNA
tctgtacggtgacaaggcgtnnnactnnntgatctcctgccaagaaggcca

SEQ ID NO: 133 - DNA, 51 bp, synthetic construct
  misc_feature 1..51: note = Synthetic Primer
  misc_difference 21..23: note = n is a, c, g, t or u
  misc_difference 27..29: note = n is a, c, g, t or u
  modified_base 20: mod_base = OTHER; note = uracil
  modified_base 33: mod_base = OTHER; note = uracil
  modified_base 41: mod_base = OTHER; note = uracil
  modified_base 50: mod_base = OTHER; note = uracil
  source 1..51: mol_type = other DNA
tctgtacggtgacaaggcgtnnnactnnntgatccacaagtcggaccccta

SEQ ID NO: 134 - DNA, 51 bp, synthetic construct
  misc_feature 1..51: note = Synthetic Primer
  misc_difference 21..23: note = n is a, c, g, t or u
  misc_difference 27..29: note = n is a, c, g, t or u
  modified_base 20: mod_base = OTHER; note = uracil
  modified_base 33: mod_base = OTHER; note = uracil
  modified_base 39: mod_base = OTHER; note = uracil
  modified_base 41: mod_base = OTHER; note = uracil
  source 1..51: mol_type = other DNA
tctgtacggtgacaaggcgtnnnactnnntgatgcggatctggaggagcag

SEQ ID NO: 135 - DNA, 51 bp, synthetic construct
  misc_feature 1..51: note = Synthetic Primer
  misc_difference 21..23: note = n is a, c, g, t or u
  misc_difference 27..29: note = n is a, c, g, t or u
  modified_base 20: mod_base = OTHER; note = uracil
  modified_base 33: mod_base = OTHER; note = uracil
  modified_base 37: mod_base = OTHER; note = uracil
  modified_base 46..47: mod_base = OTHER; note = uracil
  source 1..51: mol_type = other DNA
tctgtacggtgacaaggcgtnnnactnnntgatgagtgcggaagattgccc

SEQ ID NO: 136 - DNA, 51 bp, synthetic construct
  misc_feature 1..51: note = Synthetic Primer
  misc_difference 21..23: note = n is a, c, g, t or u
  misc_difference 27..29: note = n is a, c, g, t or u
  modified_base 20: mod_base = OTHER; note = uracil
  modified_base 33..34: mod_base = OTHER; note = uracil
  modified_base 40..41: mod_base = OTHER; note = uracil
  modified_base 47: mod_base = OTHER; note = uracil
  source 1..51: mol_type = other DNA
tctgtacggtgacaaggcgtnnnactnnntgattacacgttcacggtgccc

SEQ ID NO: 137 - DNA, 51 bp, synthetic construct
  misc_feature 1..51: note = Synthetic Primer
  misc_difference 21..23: note = n is a, c, g, t or u
  misc_difference 27..29: note = n is a, c, g, t or u
  modified_base 20: mod_base = OTHER; note = uracil
  modified_base 33: mod_base = OTHER; note = uracil
  modified_base 35: mod_base = OTHER; note = uracil
  modified_base 48: mod_base = OTHER; note = uracil
  source 1..51: mol_type = other DNA
tctgtacggtgacaaggcgtnnnactnnntgatctggaggaagcccatcga

SEQ ID NO: 138 - DNA, 51 bp, synthetic construct
  misc_feature 1..51: note = Synthetic Primer
  misc_difference 21..23: note = n is a, c, g, t or u
  misc_difference 27..29: note = n is a, c, g, t or u
  modified_base 20: mod_base = OTHER; note = uracil
  modified_base 33: mod_base = OTHER; note = uracil
  modified_base 35: mod_base = OTHER; note = uracil
  modified_base 40: mod_base = OTHER; note = uracil
  modified_base 42..43: mod_base = OTHER; note = uracil
  source 1..51: mol_type = other DNA
tctgtacggtgacaaggcgtnnnactnnntgatctgggctcttaccgcaag

SEQ ID NO: 139 - DNA, 51 bp, synthetic construct
  misc_feature 1..51: note = Synthetic Primer
  misc_difference 21..23: note = n is a, c, g, t or u
  misc_difference 27..29: note = n is a, c, g, t or u
  modified_base 20: mod_base = OTHER; note = uracil
  modified_base 33: mod_base = OTHER; note = uracil
  modified_base 43: mod_base = OTHER; note = uracil
  modified_base 50: mod_base = OTHER; note = uracil
  source 1..51: mol_type = other DNA
tctgtacggtgacaaggcgtnnnactnnntgatccccaagagtgccaagtg

SEQ ID NO: 140 - DNA, 51 bp, synthetic construct
  misc_feature 1..51: note = Synthetic Primer
  misc_difference 21..23: note = n is a, c, g, t or u
  misc_difference 27..29: note = n is a, c, g, t or u
  modified_base 20: mod_base = OTHER; note = uracil
  modified_base 33..34: mod_base = OTHER; note = uracil
  modified_base 36: mod_base = OTHER; note = uracil
  modified_base 39: mod_base = OTHER; note = uracil
  modified_base 41: mod_base = OTHER; note = uracil
  modified_base 43: mod_base = OTHER; note = uracil
  source 1..51: mol_type = other DNA
tctgtacggtgacaaggcgtnnnactnnntgattctcgtctgtcacccagg

SEQ ID NO: 141 - DNA, 51 bp, synthetic construct
  misc_feature 1..51: note = Synthetic Primer
  misc_difference 21..23: note = n is a, c, g, t or u
  misc_difference 27..29: note = n is a, c, g, t or u
  modified_base 20: mod_base = OTHER; note = uracil
  modified_base 33: mod_base = OTHER; note = uracil
  modified_base 45: mod_base = OTHER; note = uracil
  modified_base 47: mod_base = OTHER; note = uracil
  source 1..51: mol_type = other DNA
tctgtacggtgacaaggcgtnnnactnnntgatggaccagacggtctcaga

SEQ ID NO: 142 - DNA, 51 bp, synthetic construct
  misc_feature 1..51: note = Synthetic Primer
  misc_difference 21..23: note = n is a, c, g, t or u
  misc_difference 27..29: note = n is a, c, g, t or u
  modified_base 20: mod_base = OTHER; note = uracil
  modified_base 33: mod_base = OTHER; note = uracil
  modified_base 35: mod_base = OTHER; note = uracil
  modified_base 48: mod_base = OTHER; note = uracil
  source 1..51: mol_type = other DNA
tctgtacggtgacaaggcgtnnnactnnntgatatccccaaccgcactgag

SEQ ID NO: 143 - DNA, 51 bp, synthetic construct
  misc_feature 1..51: note = Synthetic Primer
  misc_difference 21..23: note = n is a, c, g, t or u
  misc_difference 27..29: note = n is a, c, g, t or u
  modified_base 20: mod_base = OTHER; note = uracil
  modified_base 33: mod_base = OTHER; note = uracil
  modified_base 36: mod_base = OTHER; note = uracil
  modified_base 48..49: mod_base = OTHER; note = uracil
  source 1..51: mol_type = other DNA
tctgtacggtgacaaggcgtnnnactnnntgatagtgacggaggagcttgt

SEQ ID NO: 144 - DNA, 51 bp, synthetic construct
  misc_feature 1..51: note = Synthetic Primer
  misc_difference 21..23: note = n is a, c, g, t or u
  misc_difference 27..29: note = n is a, c, g, t or u
  modified_base 20: mod_base = OTHER; note = uracil
  modified_base 33: mod_base = OTHER; note = uracil
  modified_base 35: mod_base = OTHER; note = uracil
  modified_base 41: mod_base = OTHER; note = uracil
  source 1..51: mol_type = other DNA
tctgtacggtgacaaggcgtnnnactnnntgatatggcactcagcagcaag

SEQ ID NO: 145 - DNA, 51 bp, synthetic construct
  misc_feature 1..51: note = Synthetic Primer
  misc_difference 21..23: note = n is a, c, g, t or u
  misc_difference 27..29: note = n is a, c, g, t or u
  modified_base 20: mod_base = OTHER; note = uracil
  modified_base 33: mod_base = OTHER; note = uracil
  modified_base 35: mod_base = OTHER; note = uracil
  modified_base 38: mod_base = OTHER; note = uracil
  modified_base 44: mod_base = OTHER; note = uracil
  source 1..51: mol_type = other DNA
tctgtacggtgacaaggcgtnnnactnnntgatgtggtggccataggaacg

SEQ ID NO: 146 - DNA, 51 bp, synthetic construct
  misc_feature 1..51: note = Synthetic Primer
  misc_difference 21..23: note = n is a, c, g, t or u
  misc_difference 27..29: note = n is a, c, g, t or u
  modified_base 20: mod_base = OTHER; note = uracil
  modified_base 33..35: mod_base = OTHER; note = uracil
  modified_base 43: mod_base = OTHER; note = uracil
  modified_base 45: mod_base = OTHER; note = uracil
  modified_base 48: mod_base = OTHER; note = uracil
  source 1..51: mol_type = other DNA
tctgtacggtgacaaggcgtnnnactnnntgatttcacgcactgtcatggg

SEQ ID NO: 147 - DNA, 51 bp, synthetic construct
  misc_feature 1..51: note = Synthetic Primer
  misc_difference 21..23: note = n is a, c, g, t or u
  misc_difference 27..29: note = n is a, c, g, t or u
  modified_base 20: mod_base = OTHER; note = uracil
  modified_base 33: mod_base = OTHER; note = uracil
  modified_base 36: mod_base = OTHER; note = uracil
  modified_base 50: mod_base = OTHER; note = uracil
  source 1..51: mol_type = other DNA
tctgtacggtgacaaggcgtnnnactnnntgatcctgaagagcacgccatg

SEQ ID NO: 148 - DNA, 51 bp, synthetic construct
  misc_feature 1..51: note = Synthetic Primer
  misc_difference 21..23: note = n is a, c, g, t or u
  misc_difference 27..29: note = n is a, c, g, t or u
  modified_base 20: mod_base = OTHER; note = uracil
  modified_base 33: mod_base = OTHER; note = uracil
  modified_base 38: mod_base = OTHER; note = uracil
  modified_base 44..46: mod_base = OTHER; note = uracil
  modified_base 49: mod_base = OTHER; note = uracil
  source 1..51: mol_type = other DNA
tctgtacggtgacaaggcgtnnnactnnntgatcagctgcacgtttcctcc

SEQ ID NO: 149 - DNA, 51 bp, synthetic construct
  misc_feature 1..51: note = Synthetic Primer
  misc_difference 21..23: note = n is a, c, g, t or u
  misc_difference 27..29: note = n is a, c, g, t or u
  modified_base 20: mod_base = OTHER; note = uracil
  modified_base 33: mod_base = OTHER; note = uracil
  modified_base 43: mod_base = OTHER; note = uracil
  modified_base 47: mod_base = OTHER; note = uracil
  source 1..51: mol_type = other DNA
tctgtacggtgacaaggcgtnnnactnnntgatagcaccagctcactgcac

SEQ ID NO: 150 - DNA, 51 bp, synthetic construct
  misc_feature 1..51: note = Synthetic Primer
  misc_difference 21..23: note = n is a, c, g, t or u
  misc_difference 27..29: note = n is a, c, g, t or u
  modified_base 20: mod_base = OTHER; note = uracil
  modified_base 33: mod_base = OTHER; note = uracil
  modified_base 35: mod_base = OTHER; note = uracil
  modified_base 38: mod_base = OTHER; note = uracil
  modified_base 43..44: mod_base = OTHER; note = uracil
  modified_base 49: mod_base = OTHER; note = uracil
  source 1..51: mol_type = other DNA
tctgtacggtgacaaggcgtnnnactnnntgatatcgtggccttgacctcc

SEQ ID NO: 151 - DNA, 51 bp, synthetic construct
  misc_feature 1..51: note = Synthetic Primer
  misc_difference 21..23: note = n is a, c, g, t or u
  misc_difference 27..29: note = n is a, c, g, t or u
  modified_base 20: mod_base = OTHER; note = uracil
  modified_base 33: mod_base = OTHER; note = uracil
  modified_base 39: mod_base = OTHER; note = uracil
  modified_base 42: mod_base = OTHER; note = uracil
  source 1..51: mol_type = other DNA
tctgtacggtgacaaggcgtnnnactnnntgatgcagctggtggaagacct

SEQ ID NO: 152 - DNA, 51 bp, synthetic construct
  misc_feature 1..51: note = Synthetic Primer
  misc_difference 21..23: note = n is a, c, g, t or u
  misc_difference 27..29: note = n is a, c, g, t or u
  modified_base 20: mod_base = OTHER; note = uracil
  modified_base 33: mod_base = OTHER; note = uracil
  modified_base 40: mod_base = OTHER; note = uracil
  modified_base 44: mod_base = OTHER; note = uracil
  modified_base 46..48: mod_base = OTHER; note = uracil
  source 1..51: mol_type = other DNA
tctgtacggtgacaaggcgtnnnactnnntgatgacgactccgtgtttgcc

SEQ ID NO: 153 - DNA, 51 bp, synthetic construct
  misc_feature 1..51: note = Synthetic Primer
  misc_difference 21..23: note = n is a, c, g, t or u
  misc_difference 27..29: note = n is a, c, g, t or u
  modified_base 20: mod_base = OTHER; note = uracil
  modified_base 33..34: mod_base = OTHER; note = uracil
  modified_base 37: mod_base = OTHER; note = uracil
  modified_base 43: mod_base = OTHER; note = uracil
  modified_base 45: mod_base = OTHER; note = uracil
  modified_base 48: mod_base = OTHER; note = uracil
  source 1..51: mol_type = other DNA
tctgtacggtgacaaggcgtnnnactnnntgattgctcacagtctcctggg

SEQ ID NO: 154 - DNA, 51 bp, synthetic construct
  misc_feature 1..51: note = Synthetic Primer
  misc_difference 21..23: note = n is a, c, g, t or u
  misc_difference 27..29: note = n is a, c, g, t or u
  modified_base 20: mod_base = OTHER; note = uracil
  modified_base 33: mod_base = OTHER; note = uracil
  modified_base 40: mod_base = OTHER; note = uracil
  modified_base 44: mod_base = OTHER; note = uracil
  source 1..51: mol_type = other DNA
tctgtacggtgacaaggcgtnnnactnnntgatgcaacctccgtgaggacg

SEQ ID NO: 155 - DNA, 51 bp, synthetic construct
  misc_feature 1..51: note = Synthetic Primer
  misc_difference 21..23: note = n is a, c, g, t or u
  misc_difference 27..29: note = n is a, c, g, t or u
  modified_base 20: mod_base = OTHER; note = uracil
  modified_base 33..34: mod_base = OTHER; note = uracil
  modified_base 37: mod_base = OTHER; note = uracil
  modified_base 40: mod_base = OTHER; note = uracil
  modified_base 42..43: mod_base = OTHER; note = uracil
  modified_base 46: mod_base = OTHER; note = uracil
  source 1..51: mol_type = other DNA
tctgtacggtgacaaggcgtnnnactnnntgattgctggtgttgctgaggg

SEQ ID NO: 156 - DNA, 51 bp, synthetic construct
  misc_feature 1..51: note = Synthetic Primer
  misc_difference 21..23: note = n is a, c, g, t or u
  misc_difference 27..29: note = n is a, c, g, t or u
  modified_base 20: mod_base = OTHER; note = uracil
  modified_base 33..34: mod_base = OTHER; note = uracil
  modified_base 40: mod_base = OTHER; note = uracil
  modified_base 50: mod_base = OTHER; note = uracil
  source 1..51: mol_type = other DNA
tctgtacggtgacaaggcgtnnnactnnntgattgacagtgcccagggctc

SEQ ID NO: 157 - DNA, 51 bp, synthetic construct
  misc_feature 1..51: note = Synthetic Primer
  misc_difference 21..23: note = n is a, c, g, t or u
  misc_difference 27..29: note = n is a, c, g, t or u
  modified_base 20: mod_base = OTHER; note = uracil
  modified_base 33: mod_base = OTHER; note = uracil
  modified_base 38: mod_base = OTHER; note = uracil
  modified_base 41: mod_base = OTHER; note = uracil
  modified_base 43..44: mod_base = OTHER; note = uracil
  modified_base 47..48: mod_base = OTHER; note = uracil
  source 1..51: mol_type = other DNA
tctgtacggtgacaaggcgtnnnactnnntgatggcctgctcttccttggg

SEQ ID NO: 158 - DNA, 51 bp, synthetic construct
  misc_feature 1..51: note = Synthetic Primer
  misc_difference 21..23: note = n is a, c, g, t or u
  misc_difference 27..29: note = n is a, c, g, t or u
  modified_base 20: mod_base = OTHER; note = uracil
  modified_base 33..35: mod_base = OTHER; note = uracil
  modified_base 39..41: mod_base = OTHER; note = uracil
  source 1..51: mol_type = other DNA
tctgtacggtgacaaggcgtnnnactnnntgatttgggtttcgaggccaac

SEQ ID NO: 159 - DNA, 51 bp, synthetic construct
  misc_feature 1..51: note = Synthetic Primer
  misc_difference 21..23: note = n is a, c, g, t or u
  misc_difference 27..29: note = n is a, c, g, t or u
  modified_base 20: mod_base = OTHER; note = uracil
  modified_base 33: mod_base = OTHER; note = uracil
  modified_base 38..40: mod_base = OTHER; note = uracil
  modified_base 43: mod_base = OTHER; note = uracil
  modified_base 46: mod_base = OTHER; note = uracil
  modified_base 50: mod_base = OTHER; note = uracil
  source 1..51: mol_type = other DNA
tctgtacggtgacaaggcgtnnnactnnntgatgggctttcctcctgcgtc

SEQ ID NO: 160 - DNA, 51 bp, synthetic construct
  misc_feature 1..51: note = Synthetic Primer
  misc_difference 21..23: note = n is a, c, g, t or u
  misc_difference 27..29: note = n is a, c, g, t or u
  modified_base 20: mod_base = OTHER; note = uracil
  modified_base 33..34: mod_base = OTHER; note = uracil
  modified_base 37: mod_base = OTHER; note = uracil
  modified_base 40: mod_base = OTHER; note = uracil
  modified_base 48: mod_base = OTHER; note = uracil
  source 1..51: mol_type = other DNA
tctgtacggtgacaaggcgtnnnactnnntgattaatgctgggacgctgcc

SEQ ID NO: 161 - DNA, 51 bp, synthetic construct
  misc_feature 1..51: note = Synthetic Primer
  misc_difference 21..23: note = n is a, c, g, t or u
  misc_difference 27..29: note = n is a, c, g, t or u
  modified_base 20: mod_base = OTHER; note = uracil
  modified_base 33: mod_base = OTHER; note = uracil
  modified_base 35: mod_base = OTHER; note = uracil
  modified_base 46..47: mod_base = OTHER; note = uracil
  source 1..51: mol_type = other DNA
tctgtacggtgacaaggcgtnnnactnnntgatctccaccaccacttcccc

SEQ ID NO: 162 - DNA, 51 bp, synthetic construct
  misc_feature 1..51: note = Synthetic Primer
  misc_difference 21..23: note = n is a, c, g, t or u
  misc_difference 27..29: note = n is a, c, g, t or u
  modified_base 20: mod_base = OTHER; note = uracil
  modified_base 33..34: mod_base = OTHER; note = uracil
  modified_base 40: mod_base = OTHER; note = uracil
  modified_base 48: mod_base = OTHER; note = uracil
  source 1..51: mol_type = other DNA
tctgtacggtgacaaggcgtnnnactnnntgattggagatccacgcctacc

SEQ ID NO: 163 - DNA, 51 bp, synthetic construct
  misc_feature 1..51: note = Synthetic Primer
  misc_difference 21..23: note = n is a, c, g, t or u
  misc_difference 27..29: note = n is a, c, g, t or u
  modified_base 20: mod_base = OTHER; note = uracil
  modified_base 33: mod_base = OTHER; note = uracil
  modified_base 41..42: mod_base = OTHER; note = uracil
  modified_base 50: mod_base = OTHER; note = uracil
  source 1..51: mol_type = other DNA
tctgtacggtgacaaggcgtnnnactnnntgatgcgaagcttcgagacctg

SEQ ID NO: 164 - DNA, 51 bp, synthetic construct
  misc_feature 1..51: note = Synthetic Primer
  misc_difference 21..23: note = n is a, c, g, t or u
  misc_difference 27..29: note = n is a, c, g, t or u
  modified_base 20: mod_base = OTHER; note = uracil
  modified_base 33..35: mod_base = OTHER; note = uracil
  modified_base 45: mod_base = OTHER; note = uracil
  modified_base 48: mod_base = OTHER; note = uracil
  source 1..51: mol_type = other DNA
tctgtacggtgacaaggcgtnnnactnnntgatttcagaggaggtcgtggg

SEQ ID NO: 165 - DNA, 51 bp, synthetic construct
  misc_feature 1..51: note = Synthetic Primer
  misc_difference 21..23: note = n is a, c, g, t or u
  misc_difference 27..29: note = n is a, c, g, t or u
  modified_base 20: mod_base = OTHER; note = uracil
  modified_base 33: mod_base = OTHER; note = uracil
  modified_base 35: mod_base = OTHER; note = uracil
  modified_base 43: mod_base = OTHER; note = uracil
  modified_base 46..47: mod_base = OTHER; note = uracil
  modified_base 50: mod_base = OTHER; note = uracil
  source 1..51: mol_type = other DNA
tctgtacggtgacaaggcgtnnnactnnntgatctggcaagctccttcctg

SEQ ID NO: 166 - DNA, 51 bp, synthetic construct
  misc_feature 1..51: note = Synthetic Primer
  misc_difference 21..23: note = n is a, c, g, t or u
  misc_difference 27..29: note = n is a, c, g, t or u
  modified_base 20: mod_base = OTHER; note = uracil
  modified_base 33: mod_base = OTHER; note = uracil
  modified_base 35: mod_base = OTHER; note = uracil
  modified_base 49: mod_base = OTHER; note = uracil
  source 1..51: mol_type = other DNA
tctgtacggtgacaaggcgtnnnactnnntgatctgccgagaagccagtca

SEQ ID NO: 167 - DNA, 51 bp, synthetic construct
  misc_feature 1..51: note = Synthetic Primer
  misc_difference 21..23: note = n is a, c, g, t or u
  misc_difference 27..29: note = n is a, c, g, t or u
  modified_base 20: mod_base = OTHER; note = uracil
  modified_base 33: mod_base = OTHER; note = uracil
  modified_base 35: mod_base = OTHER; note = uracil
  modified_base 49: mod_base = OTHER; note = uracil
  source 1..51: mol_type = other DNA
tctgtacggtgacaaggcgtnnnactnnntgatctgcaacggaagcactgg

SEQ ID NO: 168 - DNA, 51 bp, synthetic construct
  misc_feature 1..51: note = Synthetic Primer
  misc_difference 21..23: note = n is a, c, g, t or u
  misc_difference 27..29: note = n is a, c, g, t or u
  modified_base 20: mod_base = OTHER; note = uracil
  modified_base 33: mod_base = OTHER; note = uracil
  modified_base 35: mod_base = OTHER; note = uracil
  modified_base 40: mod_base = OTHER; note = uracil
  source 1..51: mol_type = other DNA
tctgtacggtgacaaggcgtnnnactnnntgatgtggagtggcagcagaag

SEQ ID NO: 169 - DNA, 51 bp, synthetic construct
  misc_feature 1..51: note = Synthetic Primer
  misc_difference 21..23: note = n is a, c, g, t or u
  misc_difference 27..29: note = n is a, c, g, t or u
  modified_base 20: mod_base = OTHER; note = uracil
  modified_base 33: mod_base = OTHER; note = uracil
  modified_base 36: mod_base = OTHER; note = uracil
  modified_base 48..49: mod_base = OTHER; note = uracil
  source 1..51: mol_type = other DNA
tctgtacggtgacaaggcgtnnnactnnntgatgctggaggagcagcttga

SEQ ID NO: 170 - DNA, 51 bp, synthetic construct
  misc_feature 1..51: note = Synthetic Primer
  misc_difference 21..23: note = n is a, c, g, t or u
  misc_difference 27..29: note = n is a, c, g, t or u
  modified_base 20: mod_base = OTHER; note = uracil
  modified_base 33..35: mod_base = OTHER; note = uracil
  modified_base 45: mod_base = OTHER; note = uracil
  source 1..51: mol_type = other DNA
tctgtacggtgacaaggcgtnnnactnnntgatttccgagccaatcacggg

SEQ ID NO: 171 - DNA, 51 bp, synthetic construct
  misc_feature 1..51: note = Synthetic Primer
  misc_difference 21..23: note = n is a, c, g, t or u
  misc_difference 27..29: note = n is a, c, g, t or u
  modified_base 20: mod_base = OTHER; note = uracil
  modified_base 33: mod_base = OTHER; note = uracil
  modified_base 37: mod_base = OTHER; note = uracil
  modified_base 39: mod_base = OTHER; note = uracil
  modified_base 42: mod_base = OTHER; note = uracil
  modified_base 49: mod_base = OTHER; note = uracil
  source 1..51: mol_type = other DNA
tctgtacggtgacaaggcgtnnnactnnntgatacatctcctacgccctgg

SEQ ID NO: 172 - DNA, 51 bp, synthetic construct
  misc_feature 1..51: note = Synthetic Primer
  misc_difference 21..23: note = n is a, c, g, t or u
  misc_difference 27..29: note = n is a, c, g, t or u
  modified_base 20: mod_base = OTHER; note = uracil
  modified_base 33: mod_base = OTHER; note = uracil
  modified_base 40: mod_base = OTHER; note = uracil
  modified_base 43: mod_base = OTHER; note = uracil
  modified_base 46..47: mod_base = OTHER; note = uracil
  source 1..51: mol_type = other DNA
tctgtacggtgacaaggcgtnnnactnnntgataccacctgctccttccag

SEQ ID NO: 173 - DNA, 51 bp, synthetic construct
  misc_feature 1..51: note = Synthetic Primer
  misc_difference 21..23: note = n is a, c, g, t or u
  misc_difference 27..29: note = n is a, c, g, t or u
  modified_base 20: mod_base = OTHER; note = uracil
  modified_base 33: mod_base = OTHER; note = uracil
  modified_base 42: mod_base = OTHER; note = uracil
  modified_base 45: mod_base = OTHER; note = uracil
  modified_base 48: mod_base = OTHER; note = uracil
  source 1..51: mol_type = other DNA
tctgtacggtgacaaggcgtnnnactnnntgatagacacggtggtactggc

SEQ ID NO: 174 - DNA, 51 bp, synthetic construct
  misc_feature 1..51: note = Synthetic Primer
  misc_difference 21..23: note = n is a, c, g, t or u
  misc_difference 27..29: note = n is a, c, g, t or u
  modified_base 20: mod_base = OTHER; note = uracil
  modified_base 33: mod_base = OTHER; note = uracil
  modified_base 38..39: mod_base = OTHER; note = uracil
  modified_base 45: mod_base = OTHER; note = uracil
  modified_base 48: mod_base = OTHER; note = uracil
  source 1..51: mol_type = other DNA
tctgtacggtgacaaggcgtnnnactnnntgatccgattgcagctcatgct

SEQ ID NO: 175 - DNA, 51 bp, synthetic construct
  misc_feature 1..51: note = Synthetic Primer
  misc_difference 21..23: note = n is a, c, g, t or u
  misc_difference 27..29: note = n is a, c, g, t or u
  modified_base 20: mod_base = OTHER; note = uracil
  modified_base 33: mod_base = OTHER; note = uracil
  modified_base 35: mod_base = OTHER; note = uracil
  modified_base 37: mod_base = OTHER; note = uracil
  source 1..51: mol_type = other DNA
tctgtacggtgacaaggcgtnnnactnnntgatctctggaagccaaggcag

SEQ ID NO: 176 - DNA, 51 bp, synthetic construct
  misc_feature 1..51: note = Synthetic Primer
  misc_difference 21..23: note = n is a, c, g, t or u
  misc_difference 27..29: note = n is a, c, g, t or u
  modified_base 20: mod_base = OTHER; note = uracil
  modified_base 33: mod_base = OTHER; note = uracil
  modified_base 36..37: mod_base = OTHER; note = uracil
  modified_base 48: mod_base = OTHER; note = uracil
  source 1..51: mol_type = other DNA
tctgtacggtgacaaggcgtnnnactnnntgatcattggccaaggagtgcc

SEQ ID NO: 177 - DNA, 51 bp, synthetic construct
  misc_feature 1..51: note = Synthetic Primer
  misc_difference 21..23: note = n is a, c, g, t or u
  misc_difference 27..29: note = n is a, c, g, t or u
  modified_base 20: mod_base = OTHER; note = uracil
  modified_base 33..34: mod_base = OTHER; note = uracil
  modified_base 36: mod_base = OTHER; note = uracil
  modified_base 48: mod_base = OTHER; note = uracil
  source 1..51: mol_type = other DNA
tctgtacggtgacaaggcgtnnnactnnntgattctggcggagcagatgag

SEQ ID NO: 178 - DNA, 51 bp, synthetic construct
  misc_feature 1..51: note = Synthetic Primer
  misc_difference 21..23: note = n is a, c, g, t or u
  misc_difference 27..29: note = n is a, c, g, t or u
  modified_base 20: mod_base = OTHER; note = uracil
  modified_base 33: mod_base = OTHER; note = uracil
  modified_base 36: mod_base = OTHER; note = uracil
  modified_base 47: mod_base = OTHER; note = uracil
  source 1..51: mol_type = other DNA
tctgtacggtgacaaggcgtnnnactnnntgatgatacccggaccctggag

SEQ ID NO: 179 - DNA, 51 bp, synthetic construct
  misc_feature 1..51: note = Synthetic Primer
  misc_difference 21..23: note = n is a, c, g, t or u
  misc_difference 27..29: note = n is a, c, g, t or u
  modified_base 20: mod_base = OTHER; note = uracil
  modified_base 33: mod_base = OTHER; note = uracil
  modified_base 38: mod_base = OTHER; note = uracil
  modified_base 47: mod_base = OTHER; note = uracil
  modified_base 50: mod_base = OTHER; note = uracil
  source 1..51: mol_type = other DNA
tctgtacggtgacaaggcgtnnnactnnntgatgagatcgccgccctcatt

SEQ ID NO: 180 - DNA, 51 bp, synthetic construct
  misc_feature 1..51: note = Synthetic Primer
  misc_difference 21..23: note = n is a, c, g, t or u
  misc_difference 27..29: note = n is a, c, g, t or u
  modified_base 20: mod_base = OTHER; note = uracil
  modified_base 33: mod_base = OTHER; note = uracil
  modified_base 35: mod_base = OTHER; note = uracil
  modified_base 50: mod_base = OTHER; note = uracil
  source 1..51: mol_type = other DNA
tctgtacggtgacaaggcgtnnnactnnntgatctgcacgcagcccaaatc

SEQ ID NO: 181 - DNA, 51 bp, synthetic construct
  misc_feature 1..51: note = Synthetic Primer
  misc_difference 21..23: note = n is a, c, g, t or u
  misc_difference 27..29: note = n is a, c, g, t or u
  modified_base 20: mod_base = OTHER; note = uracil
  modified_base 33: mod_base = OTHER; note = uracil
  modified_base 37: mod_base = OTHER; note = uracil
  modified_base 40: mod_base = OTHER; note = uracil
  modified_base 42..43: mod_base = OTHER; note = uracil
  source 1..51: mol_type = other DNA
tctgtacggtgacaaggcgtnnnactnnntgatacatcctgttgcacccca

SEQ ID NO: 182 - DNA, 51 bp, synthetic construct
  misc_feature 1..51: note = Synthetic Primer
  misc_difference 21..23: note = n is a, c, g, t or u
  misc_difference 27..29: note = n is a, c, g, t or u
  modified_base 20: mod_base = OTHER; note = uracil
  modified_base 33..34: mod_base = OTHER; note = uracil
  modified_base 42: mod_base = OTHER; note = uracil
  modified_base 50: mod_base = OTHER; note = uracil
  source 1..51: mol_type = other DNA
tctgtacggtgacaaggcgtnnnactnnntgattcgccacctccaaccatc

SEQ ID NO: 183 - DNA, 51 bp, synthetic construct
  misc_feature 1..51: note = Synthetic Primer
  misc_difference 21..23: note = n is a, c, g, t or u
  misc_difference 27..29: note = n is a, c, g, t or u
  modified_base 20: mod_base = OTHER; note = uracil
  modified_base 33: mod_base = OTHER; note = uracil
  modified_base 37: mod_base = OTHER; note = uracil
  modified_base 46: mod_base = OTHER; note = uracil
  source 1..51: mol_type = other DNA
tctgtacggtgacaaggcgtnnnactnnntgataggtgcgcaaggtgaaat

SEQ ID NO: 184 - DNA, 51 bp, synthetic construct
  misc_feature 1..51: note = Synthetic Primer
  misc_difference 21..23: note = n is a, c, g, t or u
  misc_difference 27..29: note = n is a, c, g, t or u
  modified_base 20: mod_base = OTHER; note = uracil
  modified_base 33: mod_base = OTHER; note = uracil
  modified_base 36..37: mod_base = OTHER; note = uracil
  modified_base 40: mod_base = OTHER; note = uracil
  modified_base 44: mod_base = OTHER; note = uracil
  modified_base 50: mod_base = OTHER; note = uracil
  source 1..51: mol_type = other DNA
tctgtacggtgacaaggcgtnnnactnnntgatacttgctggatgggcctg

SEQ ID NO: 185 - DNA, 51 bp, synthetic construct
  misc_feature 1..51: note = Synthetic Primer
  misc_difference 21..23: note = n is a, c, g, t or u
  misc_difference 27..29: note = n is a, c, g, t or u
  modified_base 20: mod_base = OTHER; note = uracil
  modified_base 33: mod_base = OTHER; note = uracil
  modified_base 35: mod_base = OTHER; note = uracil
  modified_base 45: mod_base = OTHER; note = uracil
  source 1..51: mol_type = other DNA
tctgtacggtgacaaggcgtnnnactnnntgatctgaaggagggtcaccgc

SEQ ID NO: 186 - DNA, 51 bp, synthetic construct
  misc_feature 1..51: note = Synthetic Primer
  misc_difference 21..23: note = n is a, c, g, t or u
  misc_difference 27..29: note = n is a, c, g, t or u
  modified_base 20: mod_base = OTHER; note = uracil
  modified_base 33: mod_base = OTHER; note = uracil
  modified_base 36: mod_base = OTHER; note = uracil
  modified_base 38: mod_base = OTHER; note = uracil
  modified_base 44: mod_base = OTHER; note = uracil
  modified_base 50: mod_base = OTHER; note = uracil
  source 1..51: mol_type = other DNA
tctgtacggtgacaaggcgtnnnactnnntgatagtgtgccagtagccgtg

SEQ ID NO: 187 - DNA, 51 bp, synthetic construct
  misc_feature 1..51: note = Synthetic Primer
  misc_difference 21..23: note = n is a, c, g, t or u
  misc_difference 27..29: note = n is a, c, g, t or u
  modified_base 20: mod_base = OTHER; note = uracil
  modified_base 33: mod_base = OTHER; note = uracil
  modified_base 37: mod_base = OTHER; note = uracil
  modified_base 39: mod_base = OTHER; note = uracil
  modified_base 45: mod_base = OTHER; note = uracil
  modified_base 49: mod_base = OTHER; note = uracil
  source 1..51: mol_type = other DNA
tctgtacggtgacaaggcgtnnnactnnntgatgcatctggagctccgtga

SEQ ID NO: 188 - DNA, 51 bp, synthetic construct
  misc_feature 1..51: note = Synthetic Primer
  misc_difference 21..23: note = n is a, c, g, t or u
  misc_difference 27..29: note = n is a, c, g, t or u
  modified_base 20: mod_base = OTHER; note = uracil
  modified_base 33: mod_base = OTHER; note = uracil
  modified_base 42: mod_base = OTHER; note = uracil
  modified_base 45: mod_base = OTHER; note = uracil
  source 1..51: mol_type = other DNA
tctgtacggtgacaaggcgtnnnactnnntgatagagaacgtggtgggcat

SEQ ID NO: 189 - DNA, 51 bp, synthetic construct
  misc_feature 1..51: note = Synthetic Primer
  misc_difference 21..23: note = n is a, c, g, t or u
  misc_difference 27..29: note = n is a, c, g, t or u
  modified_base 20: mod_base = OTHER; note = uracil
  modified_base 33: mod_base = OTHER; note = uracil
  modified_base 35..36: mod_base = OTHER; note = uracil
  modified_base 38: mod_base = OTHER; note = uracil
  source 1..51: mol_type = other DNA
tctgtacggtgacaaggcgtnnnactnnntgatcttctgaagaccggccac

SEQ ID NO: 190 - DNA, 51 bp, synthetic construct
  misc_feature 1..51: note = Synthetic Primer
  misc_difference 21..23: note = n is a, c, g, t or u
  misc_difference 27..29: note = n is a, c, g, t or u
  modified_base 20: mod_base = OTHER; note = uracil
  modified_base 33: mod_base = OTHER; note = uracil
  modified_base 35: mod_base = OTHER; note = uracil
  modified_base 50: mod_base = OTHER; note = uracil
  source 1..51: mol_type = other DNA
tctgtacggtgacaaggcgtnnnactnnntgatctccccaacaggcaggtg

SEQ ID NO: 191 - DNA, 51 bp, synthetic construct
  misc_feature 1..51: note = Synthetic Primer
  misc_difference 21..23: note = n is a, c, g, t or u
  misc_difference 27..29: note = n is a, c, g, t or u
  modified_base 20: mod_base = OTHER; note = uracil
  modified_base 33: mod_base = OTHER; note = uracil
  modified_base 39: mod_base = OTHER; note = uracil
  modified_base 44: mod_base = OTHER; note = uracil
  modified_base 47..48: mod_base = OTHER; note = uracil
  source 1..51: mol_type = other DNA
tctgtacggtgacaaggcgtnnnactnnntgatgggcatggagtacttggc

SEQ ID NO: 192 - DNA, 51 bp, synthetic construct
  misc_feature 1..51: note = Synthetic Primer
  misc_difference 21..23: note = n is a, c, g, t or u
  misc_difference 27..29: note = n is a, c, g, t or u
  modified_base 20: mod_base = OTHER; note = uracil
  modified_base 33..34: mod_base = OTHER; note = uracil
  modified_base 39: mod_base = OTHER; note = uracil
  modified_base 41: mod_base = OTHER; note = uracil
  modified_base 44: mod_base = OTHER; note = uracil
  source 1..51: mol_type = other DNA
tctgtacggtgacaaggcgtnnnactnnntgattgcagtgtcatgggcaag

SEQ ID NO: 193 - DNA, 52 bp, synthetic construct
  misc_feature 1..52: note = Synthetic Primer
  misc_difference 21..23: note = n is a, c, g, t or u
  misc_difference 27..29: note = n is a, c, g, t or u
  modified_base 20: mod_base = OTHER; note = uracil
  modified_base 33: mod_base = OTHER; note = uracil
  modified_base 37: mod_base = OTHER; note = uracil
  modified_base 39: mod_base = OTHER; note = uracil
  modified_base 41: mod_base = OTHER; note = uracil
  modified_base 43: mod_base = OTHER; note = uracil
  modified_base 46: mod_base = OTHER; note = uracil
  source 1..52: mol_type = other DNA
tctgtacggtgacaaggcgtnnnactnnntgataggtgtctgtcctgggagt

SEQ ID NO: 194 - DNA, 52 bp, synthetic construct
  misc_feature 1..52: note = Synthetic Primer
  misc_difference 21..23: note = n is a, c, g, t or u
  misc_difference 27..29: note = n is a, c, g, t or u
  modified_base 20: mod_base = OTHER; note = uracil
  modified_base 33..34: mod_base = OTHER; note = uracil
  modified_base 36: mod_base = OTHER; note = uracil
  modified_base 39..42: mod_base = OTHER; note = uracil
  source 1..52: mol_type = other DNA
tctgtacggtgacaaggcgtnnnactnnntgattgtgcttttagggcccacc

SEQ ID NO: 195 - DNA, 52 bp, synthetic construct
  misc_feature 1..52: note = Synthetic Primer
  misc_difference 21..23: note = n is a, c, g, t or u
  misc_difference 27..29: note = n is a, c, g, t or u
  modified_base 20: mod_base = OTHER; note = uracil
  modified_base 33: mod_base = OTHER; note = uracil
  modified_base 43: mod_base = OTHER; note = uracil
  modified_base 46: mod_base = OTHER; note = uracil
  modified_base 49: mod_base = OTHER; note = uracil
  source 1..52: mol_type = other DNA
tctgtacggtgacaaggcgtnnnactnnntgatcaagcccgctcatgatcaa

SEQ ID NO: 196 - DNA, 52 bp, synthetic construct
  misc_feature 1..52: note = Synthetic Primer
  misc_difference 21..23: note = n is a, c, g, t or u
  misc_difference 27..29: note = n is a, c, g, t or u
  modified_base 20: mod_base = OTHER; note = uracil
  modified_base 33: mod_base = OTHER; note = uracil
  modified_base 40: mod_base = OTHER; note = uracil
  modified_base 44: mod_base = OTHER; note = uracil
  modified_base 50: mod_base = OTHER; note = uracil
  source 1..52: mol_type = other DNA
tctgtacggtgacaaggcgtnnnactnnntgatgggcactgggtcaaagtct

SEQ ID NO: 197 - DNA, 52 bp, synthetic construct
  misc_feature 1..52: note = Synthetic Primer
  misc_difference 21..23: note = n is a, c, g, t or u
  misc_difference 27..29: note = n is a, c, g, t or u
  modified_base 20: mod_base = OTHER; note = uracil
  modified_base 33: mod_base = OTHER; note = uracil
  modified_base 35: mod_base = OTHER; note = uracil
  modified_base 38: mod_base = OTHER; note = uracil
  modified_base 48: mod_base = OTHER; note = uracil
  source 1..52: mol_type = other DNA
tctgtacggtgacaaggcgtnnnactnnntgatctgatgggacccactccat

SEQ ID NO: 198 - DNA, 52 bp, synthetic construct
  misc_feature 1..52: note = Synthetic Primer
  misc_difference 21..23: note = n is a, c, g, t or u
  misc_difference 27..29: note = n is a, c, g, t or u
  modified_base 20: mod_base = OTHER; note = uracil
  modified_base 33: mod_base = OTHER; note = uracil
  modified_base 35: mod_base = OTHER; note = uracil
  modified_base 42: mod_base = OTHER; note = uracil
  source 1..52: mol_type = other DNA
tctgtacggtgacaaggcgtnnnactnnntgatctccaaaatggcccgagac

SEQ ID NO: 199 - DNA, 52 bp, synthetic construct
  misc_feature 1..52: note = Synthetic Primer
  misc_difference 21..23: note = n is a, c, g, t or u
  misc_difference 27..29: note = n is a, c, g, t or u
  modified_base 20: mod_base = OTHER; note = uracil
  modified_base 33: mod_base = OTHER; note = uracil
  modified_base 43..44: mod_base = OTHER; note = uracil
  modified_base 46..47: mod_base = OTHER; note = uracil
  source 1..52: mol_type = other DNA
tctgtacggtgacaaggcgtnnnactnnntgatcagcagggcttcttcagca

SEQ ID NO: 200 - DNA, 52 bp, synthetic construct
  misc_feature 1..52: note = Synthetic Primer
  misc_difference 21..23: note = n is a, c, g, t or u
  misc_difference 27..29: note = n is a, c, g, t or u
  modified_base 20: mod_base = OTHER; note = uracil
  modified_base 33: mod_base = OTHER; note = uracil
  modified_base 43: mod_base = OTHER; note = uracil
  modified_base 48: mod_base = OTHER; note = uracil
  source 1..52: mol_type = other DNA
tctgtacggtgacaaggcgtnnnactnnntgatagcgggacatggactcaac

SEQ ID NO: 201 - DNA, 52 bp, synthetic construct
  misc_feature 1..52: note = Synthetic Primer
  misc_difference 21..23: note = n is a, c, g, t or u
  misc_difference 27..29: note = n is a, c, g, t or u
  modified_base 20: mod_base = OTHER; note = uracil
  modified_base 33: mod_base = OTHER; note = uracil
  modified_base 37: mod_base = OTHER; note = uracil
  modified_base 39: mod_base = OTHER; note = uracil
  modified_base 42: mod_base = OTHER; note = uracil
  modified_base 45: mod_base = OTHER; note = uracil
  source 1..52: mol_type = other DNA
tctgtacggtgacaaggcgtnnnactnnntgatgcatgtactggtcccgcat

SEQ ID NO: 202 - DNA, 52 bp, synthetic construct
  misc_feature 1..52: note = Synthetic Primer
  misc_difference 21..23: note = n is a, c, g, t or u
  misc_difference 27..29: note = n is a, c, g, t or u
  modified_base 20: mod_base = OTHER; note = uracil
  modified_base 33: mod_base = OTHER; note = uracil
  modified_base 39: mod_base = OTHER; note = uracil
  modified_base 49: mod_base = OTHER; note = uracil
  source 1..52: mol_type = other DNA
tctgtacggtgacaaggcgtnnnactnnntgatcggaatgccaacccatgga

SEQ ID NO: 203 - DNA, 52 bp, synthetic construct
  misc_feature 1..52: note = Synthetic Primer
  misc_difference 21..23: note = n is a, c, g, t or u
  misc_difference 27..29: note = n is a, c, g, t or u
  modified_base 20: mod_base = OTHER; note = uracil
  modified_base 33..34: mod_base = OTHER; note = uracil
  modified_base 46: mod_base = OTHER; note = uracil
  modified_base 51: mod_base = OTHER; note = uracil
  source 1..52: mol_type = other DNA
tctgtacggtgacaaggcgtnnnactnnntgattaggcgaggagctccagtc

SEQ ID NO: 204 - DNA, 52 bp, synthetic construct
  misc_feature 1..52: note = Synthetic Primer
  misc_difference 21..23: note = n is a, c, g, t or u
  misc_difference 27..29: note = n is a, c, g, t or u
  modified_base 20: mod_base = OTHER; note = uracil
  modified_base 33: mod_base = OTHER; note = uracil
  modified_base 36: mod_base = OTHER; note = uracil
  modified_base 42: mod_base = OTHER; note = uracil
  modified_base 47..49: mod_base = OTHER; note = uracil
  modified_base 51: mod_base = OTHER; note = uracil
  source 1..52: mol_type = other DNA
tctgtacggtgacaaggcgtnnnactnnntgatggtgaggctcccctttctt

SEQ ID NO: 205 - DNA, 52 bp, synthetic construct
  misc_feature 1..52: note = Synthetic Primer
  misc_difference 21..23: note = n is a, c, g, t or u
  misc_difference 27..29: note = n is a, c, g, t or u
  modified_base 20: mod_base = OTHER; note = uracil
  modified_base 33: mod_base = OTHER; note = uracil
  modified_base 40: mod_base = OTHER; note = uracil
  modified_base 42: mod_base = OTHER; note = uracil
  modified_base 47: mod_base = OTHER; note = uracil
  modified_base 51: mod_base = OTHER; note = uracil
  source 1..52: mol_type = other DNA
tctgtacggtgacaaggcgtnnnactnnntgatcagccctctgacgtccatc

SEQ ID NO: 206 - DNA, 52 bp, synthetic construct
  misc_feature 1..52: note = Synthetic Primer
  misc_difference 21..23: note = n is a, c, g, t or u
  misc_difference 27..29: note = n is a, c, g, t or u
  modified_base 20: mod_base = OTHER; note = uracil
  modified_base 33: mod_base = OTHER; note = uracil
  modified_base 37: mod_base = OTHER; note = uracil
  modified_base 43: mod_base = OTHER; note = uracil
  modified_base 48: mod_base = OTHER; note = uracil
  source 1..52: mol_type = other DNA
tctgtacggtgacaaggcgtnnnactnnntgataggtgcccatcaagtggat

SEQ ID NO: 207 - DNA, 52 bp, synthetic construct
  misc_feature 1..52: note = Synthetic Primer
  misc_difference 21..23: note = n is a, c, g, t or u
  misc_difference 27..29: note = n is a, c, g, t or u
  modified_base 20: mod_base = OTHER; note = uracil
  modified_base 33: mod_base = OTHER; note = uracil
  modified_base 36: mod_base = OTHER; note = uracil
  modified_base 39: mod_base = OTHER; note = uracil
  modified_base 48: mod_base = OTHER; note = uracil
  source 1..52: mol_type = other DNA
tctgtacggtgacaaggcgtnnnactnnntgatcgtcctgaagcaggtcaac

SEQ ID NO: 208 - DNA, 52 bp, synthetic construct
  misc_feature 1..52: note = Synthetic Primer
  misc_difference 21..23: note = n is a, c, g, t or u
  misc_difference 27..29: note = n is a, c, g, t or u
  modified_base 20: mod_base = OTHER; note = uracil
  modified_base 33: mod_base = OTHER; note = uracil
  modified_base 37: mod_base = OTHER; note = uracil
  modified_base 43: mod_base = OTHER; note = uracil
  modified_base 45: mod_base = OTHER; note = uracil
  modified_base 47: mod_base = OTHER; note = uracil
  modified_base 49: mod_base = OTHER; note = uracil
  modified_base 51: mod_base = OTHER; note = uracil
  source 1..52: mol_type = other DNA
tctgtacggtgacaaggcgtnnnactnnntgatgggtgagggtgtctctctg

SEQ ID NO: 209 - DNA, 52 bp, synthetic construct
  misc_feature 1..52: note = Synthetic Primer
  misc_difference 21..23: note = n is a, c, g, t or u
  misc_difference 27..29: note = n is a, c, g, t or u
  modified_base 20: mod_base = OTHER; note = uracil
  modified_base 33: mod_base = OTHER; note = uracil
  modified_base 36: mod_base = OTHER; note = uracil
  modified_base 40: mod_base = OTHER; note = uracil
  source 1..52: mol_type = other DNA
tctgtacggtgacaaggcgtnnnactnnntgatagtaaatacgggcccgacg

SEQ ID NO: 210 - DNA, 52 bp, synthetic construct
  misc_feature 1..52: note = Synthetic Primer
  misc_difference 21..23: note = n is a, c, g, t or u
  misc_difference 27..29: note = n is a, c, g, t or u
  modified_base 20: mod_base = OTHER; note = uracil
  modified_base 33: mod_base = OTHER; note = uracil
  modified_base 35..36: mod_base = OTHER; note = uracil
  modified_base 41: mod_base = OTHER; note = uracil
  modified_base 45..46: mod_base = OTHER; note = uracil
  modified_base 48: mod_base = OTHER; note = uracil
  source 1..52: mol_type = other DNA
tctgtacggtgacaaggcgtnnnactnnntgatcttcccctccattgtgggc

SEQ ID NO: 211 - DNA, 52 bp, synthetic construct
  misc_feature 1..52: note = Synthetic Primer
  misc_difference 21..23: note = n is a, c, g, t or u
  misc_difference 27..29: note = n is a, c, g, t or u
  modified_base 20: mod_base = OTHER; note = uracil
  modified_base 33: mod_base = OTHER; note = uracil
  modified_base 37: mod_base = OTHER; note = uracil
  modified_base 48: mod_base = OTHER; note = uracil
  source 1..52: mol_type = other DNA
tctgtacggtgacaaggcgtnnnactnnntgatccatccgaaagcagtccaa

SEQ ID NO: 212 - DNA, 52 bp, synthetic construct
  misc_feature 1..52: note = Synthetic Primer
  misc_difference 21..23: note = n is a, c, g, t or u
  misc_difference 27..29: note = n is a, c, g, t or u
  modified_base 20: mod_base = OTHER; note = uracil
  modified_base 33: mod_base = OTHER; note = uracil
  modified_base 44: mod_base = OTHER; note = uracil
  modified_base 50: mod_base = OTHER; note = uracil
  source 1..52: mol_type = other DNA
tctgtacggtgacaaggcgtnnnactnnntgatagggcaggagtcaagatgc

SEQ ID NO: 213 - DNA, 52 bp, synthetic construct
  misc_feature 1..52: note = Synthetic Primer
  misc_difference 21..23: note = n is a, c, g, t or u
  misc_difference 27..29: note = n is a, c, g, t or u
  modified_base 20: mod_base = OTHER; note = uracil
  modified_base 33: mod_base = OTHER; note = uracil
  modified_base 35: mod_base = OTHER; note = uracil
  modified_base 43: mod_base = OTHER; note = uracil
  modified_base 47: mod_base = OTHER; note = uracil
  modified_base 51: mod_base = OTHER; note = uracil
  source 1..52: mol_type = other DNA
tctgtacggtgacaaggcgtnnnactnnntgatatgggcccctggatggata

SEQ ID NO: 214 - DNA, 52 bp, synthetic construct
  misc_feature 1..52: note = Synthetic Primer
  misc_difference 21..23: note = n is a, c, g, t or u
  misc_difference 27..29: note = n is a, c, g, t or u
  modified_base 20: mod_base = OTHER; note = uracil
  modified_base 33: mod_base = OTHER; note = uracil
  modified_base 36: mod_base = OTHER; note = uracil
  modified_base 45: mod_base = OTHER; note = uracil
  modified_base 47: mod_base = OTHER; note = uracil
  modified_base 49: mod_base = OTHER; note = uracil
  modified_base 51: mod_base = OTHER; note = uracil
  source 1..52: mol_type = other DNA
tctgtacggtgacaaggcgtnnnactnnntgatggtagcagccgtctgtctc

SEQ ID NO: 215 - DNA, 52 bp, synthetic construct
  misc_feature 1..52: note = Synthetic Primer
  misc_difference 21..23: note = n is a, c, g, t or u
  misc_difference 27..29: note = n is a, c, g, t or u
  modified_base 20: mod_base = OTHER; note = uracil
  modified_base 33: mod_base = OTHER; note = uracil
  modified_base 35: mod_base = OTHER; note = uracil
  modified_base 42: mod_base = OTHER; note = uracil
  source 1..52: mol_type = other DNA
tctgtacggtgacaaggcgtnnnactnnntgatgtacacactgcagcccaag

SEQ ID NO: 216 - DNA, 52 bp, synthetic construct
  misc_feature 1..52: note = Synthetic Primer
  misc_difference 21..23: note = n is a, c, g, t or u
  misc_difference 27..29: note = n is a, c, g, t or u
  modified_base 20: mod_base = OTHER; note = uracil
  modified_base 33: mod_base = OTHER; note = uracil
  modified_base 35: mod_base = OTHER; note = uracil
  modified_base 38: mod_base = OTHER; note = uracil
  modified_base 40: mod_base = OTHER; note = uracil
  modified_base 44: mod_base = OTHER; note = uracil
  source 1..52: mol_type = other DNA
tctgtacggtgacaaggcgtnnnactnnntgatctactatccctcgggaggc

SEQ ID NO: 217 - DNA, 52 bp, synthetic construct
  misc_feature 1..52: note = Synthetic Primer
  misc_difference 21..23: note = n is a, c, g, t or u
  misc_difference 27..29: note = n is a, c, g, t or u
  modified_base 20: mod_base = OTHER; note = uracil
  modified_base 33: mod_base = OTHER; note = uracil
  modified_base 36..38: mod_base = OTHER; note = uracil
  modified_base 51: mod_base = OTHER; note = uracil
  source 1..52: mol_type = other DNA
tctgtacggtgacaaggcgtnnnactnnntgatcctttaaggccccagcgtc

SEQ ID NO: 218 - DNA, 52 bp, synthetic construct
  misc_feature 1..52: note = Synthetic Primer
  misc_difference 21..23: note = n is a, c, g, t or u
  misc_difference 27..29: note = n is a, c, g, t or u
  modified_base 20: mod_base = OTHER; note = uracil
  modified_base 33: mod_base = OTHER; note = uracil
  modified_base 41..42: mod_base = OTHER; note = uracil
  modified_base 47: mod_base = OTHER; note = uracil
  modified_base 49: mod_base = OTHER; note = uracil
  modified_base 51: mod_base = OTHER; note = uracil
  source 1..52: mol_type = other DNA
tctgtacggtgacaaggcgtnnnactnnntgatgaccggattcgcatgtgtg

SEQ ID NO: 219 - DNA, 52 bp, synthetic construct
  misc_feature 1..52: note = Synthetic Primer
  misc_difference 21..23: note = n is a, c, g, t or u
  misc_difference 27..29: note = n is a, c, g, t or u
  modified_base 20: mod_base = OTHER; note = uracil
  modified_base 33: mod_base = OTHER; note = uracil
  modified_base 35: mod_base = OTHER; note = uracil
  modified_base 41: mod_base = OTHER; note = uracil
  modified_base 44: mod_base = OTHER; note = uracil
  modified_base 46: mod_base = OTHER; note = uracil
  source 1..52: mol_type = other DNA
tctgtacggtgacaaggcgtnnnactnnntgatgtccagctcctctgacagc

SEQ ID NO: 220 - DNA, 52 bp, synthetic construct
  misc_feature 1..52: note = Synthetic Primer
  misc_difference 21..23: note = n is a, c, g, t or u
  misc_difference 27..29: note = n is a, c, g, t or u
  modified_base 20: mod_base = OTHER; note = uracil
  modified_base 33: mod_base = OTHER; note = uracil
  modified_base 35: mod_base = OTHER; note = uracil
  modified_base 37: mod_base = OTHER; note = uracil
  source 1..52: mol_type = other DNA
tctgtacggtgacaaggcgtnnnactnnntgatgtctccaccccagcaaaac

SEQ ID NO: 221 - DNA, 52 bp, synthetic construct
  misc_feature 1..52: note = Synthetic Primer
  misc_difference 21..23: note = n is a, c, g, t or u
  misc_difference 27..29: note = n is a, c, g, t or u
  modified_base 20: mod_base = OTHER; note = uracil
  modified_base 33..34: mod_base = OTHER; note = uracil
  modified_base 37..38: mod_base = OTHER; note = uracil
  modified_base 41: mod_base = OTHER; note = uracil
  modified_base 47: mod_base = OTHER; note = uracil
  modified_base 50: mod_base = OTHER; note = uracil
  source 1..52: mol_type = other DNA
tctgtacggtgacaaggcgtnnnactnnntgattcattcatgcccctcctgg

SEQ ID NO: 222 - DNA, 52 bp, synthetic construct
  misc_feature 1..52: note = Synthetic Primer
  misc_difference 21..23: note = n is a, c, g, t or u
  misc_difference 27..29: note = n is a, c, g, t or u
  modified_base 20: mod_base = OTHER; note = uracil
  modified_base 33: mod_base = OTHER; note = uracil
  modified_base 35: mod_base = OTHER; note = uracil
  modified_base 40: mod_base = OTHER; note = uracil
  modified_base 50: mod_base = OTHER; note = uracil
  source 1..52: mol_type = other DNA
tctgtacggtgacaaggcgtnnnactnnntgatctgaagtgcaaggcactgc

SEQ ID NO: 223 - DNA, 52 bp, synthetic construct
  misc_feature 1..52: note = Synthetic Primer
  misc_difference 21..23: note = n is a, c, g, t or u
  misc_difference 27..29: note = n is a, c, g, t or u
  modified_base 20: mod_base = OTHER; note = uracil
  modified_base 33: mod_base = OTHER; note = uracil
  modified_base 35..36: mod_base = OTHER; note = uracil
  modified_base 41: mod_base = OTHER; note = uracil
  modified_base 50: mod_base = OTHER; note = uracil
  source 1..52: mol_type = other DNA
tctgtacggtgacaaggcgtnnnactnnntgatcttcacgtgcagcacatgg

SEQ ID NO: 224 - DNA, 52 bp, synthetic construct
  misc_feature 1..52: note = Synthetic Primer
  misc_difference 21..23: note = n is a, c, g, t or u
  misc_difference 27..29: note = n is a, c, g, t or u
  modified_base 20: mod_base = OTHER; note = uracil
  modified_base 33: mod_base = OTHER; note = uracil
  modified_base 36..38: mod_base = OTHER; note = uracil
  modified_base 51: mod_base = OTHER; note = uracil
  source 1..52: mol_type = other DNA
tctgtacggtgacaaggcgtnnnactnnntgatggtttcacgccaccaactt

SEQ ID NO: 225 - DNA, 52 bp, synthetic construct
  misc_feature 1..52: note = Synthetic Primer
  misc_difference 21..23: note = n is a, c, g, t or u
  misc_difference 27..29: note = n is a, c, g, t or u
  modified_base 20: mod_base = OTHER; note = uracil
  modified_base 33..34: mod_base = OTHER; note = uracil
  modified_base 36..37: mod_base = OTHER; note = uracil
  modified_base 39: mod_base = OTHER; note = uracil
  modified_base 44: mod_base = OTHER; note = uracil
  modified_base 48: mod_base = OTHER; note = uracil
  modified_base 50: mod_base = OTHER; note = uracil
  source 1..52: mol_type = other DNA
tctgtacggtgacaaggcgtnnnactnnntgattcttctgggctgggtgtga

SEQ ID NO: 226 - DNA, 52 bp, synthetic construct
  misc_feature 1..52: note = Synthetic Primer
  misc_difference 21..23: note = n is a, c, g, t or u
  misc_difference 27..29: note = n is a, c, g, t or u
  modified_base 20: mod_base = OTHER; note = uracil
  modified_base 33: mod_base = OTHER; note = uracil
  modified_base 38: mod_base = OTHER; note = uracil
  modified_base 43: mod_base = OTHER; note = uracil
  modified_base 45: mod_base = OTHER; note = uracil
  modified_base 50: mod_base = OTHER; note = uracil
  source 1..52: mol_type = other DNA
tctgtacggtgacaaggcgtnnnactnnntgatacgctggcctataaggtgc

SEQ ID NO: 227 - DNA, 52 bp, synthetic construct
  misc_feature 1..52: note = Synthetic Primer
  misc_difference 21..23: note = n is a, c, g, t or u
  misc_difference 27..29: note = n is a, c, g, t or u
  modified_base 20: mod_base = OTHER; note = uracil
  modified_base 33: mod_base = OTHER; note = uracil
  modified_base 35..36: mod_base = OTHER; note = uracil
  modified_base 41: mod_base = OTHER; note = uracil
  source 1..52: mol_type = other DNA
tctgtacggtgacaaggcgtnnnactnnntgatcttgacctcccagaccgag

SEQ ID NO: 228 - DNA, 52 bp, synthetic construct
  misc_feature 1..52: note = Synthetic Primer
  misc_difference 21..23: note = n is a, c, g, t or u
  misc_difference 27..29: note = n is a, c, g, t or u
  modified_base 20: mod_base = OTHER; note = uracil
  modified_base 33..35: mod_base = OTHER; note = uracil
  modified_base 41: mod_base = OTHER; note = uracil
  modified_base 45: mod_base = OTHER; note = uracil
  modified_base 47: mod_base = OTHER; note = uracil
  modified_base 50: mod_base = OTHER; note = uracil
  source 1..52: mol_type = other DNA
tctgtacggtgacaaggcgtnnnactnnntgatttgggcatcactgtcctcg

SEQ ID NO: 229 - DNA, 52 bp, synthetic construct
  misc_feature 1..52: note = Synthetic Primer
  misc_difference 21..23: note = n is a, c, g, t or u
  misc_difference 27..29: note = n is a, c, g, t or u
  modified_base 20: mod_base = OTHER; note = uracil
  modified_base 33: mod_base = OTHER; note = uracil
  modified_base 37..38: mod_base = OTHER; note = uracil
  modified_base 49: mod_base = OTHER; note = uracil
  source 1..52: mol_type = other DNA
tctgtacggtgacaaggcgtnnnactnnntgatagcttgagcagcagctgag

SEQ ID NO: 230 - DNA, 52 bp, synthetic construct
  misc_feature 1..52: note = Synthetic Primer
  misc_difference 21..23: note = n is a, c, g, t or u
  misc_difference 27..29: note = n is a, c, g, t or u
  modified_base 20: mod_base = OTHER; note = uracil
  modified_base 33: mod_base = OTHER; note = uracil
  modified_base 40: mod_base = OTHER; note = uracil
  modified_base 42: mod_base = OTHER; note = uracil
  modified_base 44: mod_base = OTHER; note = uracil
  modified_base 46: mod_base = OTHER; note = uracil
  modified_base 49: mod_base = OTHER; note = uracil
  source 1..52: mol_type = other DNA
tctgtacggtgacaaggcgtnnnactnnntgataacagctctctgtgatgcg

SEQ ID NO: 231 - DNA, 52 bp, synthetic construct
  misc_feature 1..52: note = Synthetic Primer
  misc_difference 21..23: note = n is a, c, g, t or u
  misc_difference 27..29: note = n is a, c, g, t or u
  modified_base 20: mod_base = OTHER; note = uracil
  modified_base 33: mod_base = OTHER; note = uracil
  modified_base 49: mod_base = OTHER; note = uracil
  modified_base 51: mod_base = OTHER; note = uracil
  source 1..52: mol_type = other DNA
tctgtacggtgacaaggcgtnnnactnnntgatacgacgggaggacaatctc

SEQ ID NO: 232 - DNA, 52 bp, synthetic construct
  misc_feature 1..52: note = Synthetic Primer
  misc_difference 21..23: note = n is a, c, g, t or u
  misc_difference 27..29: note = n is a, c, g, t or u
  modified_base 20: mod_base = OTHER; note = uracil
  modified_base 33: mod_base = OTHER; note = uracil
  modified_base 38: mod_base = OTHER; note = uracil
  modified_base 46: mod_base = OTHER; note = uracil
  modified_base 48: mod_base = OTHER; note = uracil
  source 1..52: mol_type = other DNA
tctgtacggtgacaaggcgtnnnactnnntgatcggctgcaggactatgagg

SEQ ID NO: 233 - DNA, 52 bp, synthetic construct
  misc_feature 1..52: note = Synthetic Primer
  misc_difference 21..23: note = n is a, c, g, t or u
  misc_difference 27..29: note = n is a, c, g, t or u
  modified_base 20: mod_base = OTHER; note = uracil
  modified_base 33: mod_base = OTHER; note = uracil
  modified_base 37..38: mod_base = OTHER; note = uracil
  modified_base 44: mod_base = OTHER; note = uracil
  modified_base 49: mod_base = OTHER; note = uracil
  source 1..52: mol_type = other DNA
tctgtacggtgacaaggcgtnnnactnnntgataccttgagcatcgcatcca

SEQ ID NO: 234 - DNA, 52 bp, synthetic construct
  misc_feature 1..52: note = Synthetic Primer
  misc_difference 21..23: note = n is a, c, g, t or u
  misc_difference 27..29: note = n is a, c, g, t or u
  modified_base 20: mod_base = OTHER; note = uracil
  modified_base 33: mod_base = OTHER; note = uracil
  modified_base 42: mod_base = OTHER; note = uracil
  modified_base 51: mod_base = OTHER; note = uracil
  source 1..52: mol_type = other DNA
tctgtacggtgacaaggcgtnnnactnnntgatgagggacgtgaacggagtg

SEQ ID NO: 235 - DNA, 52 bp, synthetic construct
  misc_feature 1..52: note = Synthetic Primer
  misc_difference 21..23: note = n is a, c, g, t or u
  misc_difference 27..29: note = n is a, c, g, t or u
  modified_base 20: mod_base = OTHER; note = uracil
  modified_base 33: mod_base = OTHER; note = uracil
  modified_base 45: mod_base = OTHER; note = uracil
  modified_base 51: mod_base = OTHER; note = uracil
  source 1..52: mol_type = other DNA
tctgtacggtgacaaggcgtnnnactnnntgatacacccccagctccagctc

SEQ ID NO: 236 - DNA, 52 bp, synthetic construct
  misc_feature 1..52: note = Synthetic Primer
  misc_difference 21..23: note = n is a, c, g, t or u
  misc_difference 27..29: note = n is a, c, g, t or u
  modified_base 20: mod_base = OTHER; note = uracil
  modified_base 33: mod_base = OTHER; note = uracil
  modified_base 37..39: mod_base = OTHER; note = uracil
  modified_base 47: mod_base = OTHER; note = uracil
  modified_base 50: mod_base = OTHER; note = uracil
  source 1..52: mol_type = other DNA
tctgtacggtgacaaggcgtnnnactnnntgatgcctttcgagcagtactcc

SEQ ID NO: 237 - DNA, 52 bp, synthetic construct
  misc_feature 1..52: note = Synthetic Primer
  misc_difference 21..23: note = n is a, c, g, t or u
  misc_difference 27..29: note = n is a, c, g, t or u
  modified_base 20: mod_base = OTHER; note = uracil
  modified_base 33: mod_base = OTHER; note = uracil
  modified_base 39: mod_base = OTHER; note = uracil
  modified_base 47: mod_base = OTHER; note = uracil
  modified_base 49: mod_base = OTHER; note = uracil
  source 1..52: mol_type = other DNA
tctgtacggtgacaaggcgtnnnactnnntgatcacagtacccggctgtaga

SEQ ID NO: 238 - DNA, 52 bp, synthetic construct
  misc_feature 1..52: note = Synthetic Primer
  misc_difference 21..23: note = n is a, c, g, t or u
  misc_difference 27..29: note = n is a, c, g, t or u
  modified_base 20: mod_base = OTHER; note = uracil
  modified_base 33: mod_base = OTHER; note = uracil
  modified_base 35: mod_base = OTHER; note = uracil
  modified_base 41: mod_base = OTHER; note = uracil
  source 1..52: mol_type = other DNA
tctgtacggtgacaaggcgtnnnactnnntgatgtggccataaagggcaacc

SEQ ID NO: 239 - DNA, 52 bp, synthetic construct
  misc_feature 1..52: note = Synthetic Primer
  misc_difference 21..23: note = n is a, c, g, t or u
  misc_difference 27..29: note = n is a, c, g, t or u
  modified_base 20: mod_base = OTHER; note = uracil
  modified_base 33: mod_base = OTHER; note = uracil
  modified_base 35: mod_base = OTHER; note = uracil
  modified_base 48..49: mod_base = OTHER; note = uracil
  source 1..52: mol_type = other DNA
tctgtacggtgacaaggcgtnnnactnnntgatgtcagcccagaccattcag

SEQ ID NO: 240 - DNA, 52 bp, synthetic construct
  misc_feature 1..52: note = Synthetic Primer
  misc_difference 21..23: note = n is a, c, g, t or u
  misc_difference 27..29: note = n is a, c, g, t or u
  modified_base 20: mod_base = OTHER; note = uracil
  modified_base 33..34: mod_base = OTHER; note = uracil
  modified_base 37: mod_base = OTHER; note = uracil
  modified_base 43: mod_base = OTHER; note = uracil
  modified_base 47: mod_base = OTHER; note = uracil
  modified_base 49: mod_base = OTHER; note = uracil
  source 1..52: mol_type = other DNA
tctgtacggtgacaaggcgtnnnactnnntgattgctcaggctacatctcgc

SEQ ID NO: 241 - DNA, 52 bp, synthetic construct
  misc_feature 1..52: note = Synthetic Primer
  misc_difference 21..23: note = n is a, c, g, t or u
  misc_difference 27..29: note = n is a, c, g, t or u
  modified_base 20: mod_base = OTHER; note = uracil
  modified_base 33: mod_base = OTHER; note = uracil
  modified_base 35: mod_base = OTHER; note = uracil
  modified_base 51: mod_base = OTHER; note = uracil
  source 1..52: mol_type = other DNA
tctgtacggtgacaaggcgtnnnactnnntgatctggaccacggcaaagatg

SEQ ID NO: 242 - DNA, 52 bp, synthetic construct
  misc_feature 1..52: note = Synthetic Primer
  misc_difference 21..23: note = n is a, c, g, t or u
  misc_difference 27..29: note = n is a, c, g, t or u
  modified_base 20: mod_base = OTHER; note = uracil
  modified_base 33: mod_base = OTHER; note = uracil
  modified_base 37: mod_base = OTHER; note = uracil
  modified_base 43: mod_base = OTHER; note = uracil
  modified_base 47..49: mod_base = OTHER; note = uracil
  source 1..52: mol_type = other DNA
tctgtacggtgacaaggcgtnnnactnnntgatcagtggacgtggatttggg

SEQ ID NO: 243 - DNA, 52 bp, synthetic construct
  misc_feature 1..52: note = Synthetic Primer
  misc_difference 21..23: note = n is a, c, g, t or u
  misc_difference 27..29: note = n is a, c, g, t or u
  modified_base 20: mod_base = OTHER; note = uracil
  modified_base 33: mod_base = OTHER; note = uracil
  modified_base 37: mod_base = OTHER; note = uracil
  modified_base 51: mod_base = OTHER; note = uracil
  source 1..52: mol_type = other DNA
tctgtacggtgacaaggcgtnnnactnnntgatgcatcacagagcgaagctg

SEQ ID NO: 244 - DNA, 52 bp, synthetic construct
  misc_feature 1..52: note = Synthetic Primer
  misc_difference 21..23: note = n is a, c, g, t or u
  misc_difference 27..29: note = n is a, c, g, t or u
  modified_base 20: mod_base = OTHER; note = uracil
  modified_base 33: mod_base = OTHER; note = uracil
  modified_base 36: mod_base = OTHER; note = uracil
  modified_base 38..39: mod_base = OTHER; note = uracil
  modified_base 41: mod_base = OTHER; note = uracil
  modified_base 44: mod_base = OTHER; note = uracil
  source 1..52: mol_type = other DNA
tctgtacggtgacaaggcgtnnnactnnntgatagtgttgtgatccgccact

SEQ ID NO: 245 - DNA, 52 bp, synthetic construct
  misc_feature 1..52: note = Synthetic Primer
  misc_difference 21..23: note = n is a, c, g, t or u
  misc_difference 27..29: note = n is a, c, g, t or u
  modified_base 20: mod_base = OTHER; note = uracil
  modified_base 33..36: mod_base = OTHER; note = uracil
  modified_base 38: mod_base = OTHER; note = uracil
  modified_base 44: mod_base = OTHER; note = uracil
  modified_base 47: mod_base = OTHER; note = uracil
  source 1..52: mol_type = other DNA
tctgtacggtgacaaggcgtnnnactnnntgattttctgggactcatgccct

SEQ ID NO: 246 - DNA, 52 bp, synthetic construct
  misc_feature 1..52: note = Synthetic Primer
  misc_difference 21..23: note = n is a, c, g, t or u
  misc_difference 27..29: note = n is a, c, g, t or u
  modified_base 20: mod_base = OTHER; note = uracil
  modified_base 33: mod_base = OTHER; note = uracil
  modified_base 49: mod_base = OTHER; note = uracil
  modified_base 51: mod_base = OTHER; note = uracil
  source 1..52: mol_type = other DNA
tctgtacggtgacaaggcgtnnnactnnntgataccgcgacgacaagatctg

SEQ ID NO: 247 - DNA, 52 bp, synthetic construct
  misc_feature 1..52: note = Synthetic Primer
  misc_difference 21..23: note = n is a, c, g, t or u
  misc_difference 27..29: note = n is a, c, g, t or u
  modified_base 20: mod_base = OTHER; note = uracil
  modified_base 33: mod_base = OTHER; note = uracil
  modified_base 35..36: mod_base = OTHER; note = uracil
  modified_base 38: mod_base = OTHER; note = uracil
  source 1..52: mol_type = other DNA
tctgtacggtgacaaggcgtnnnactnnntgatcttctacagcccagcccag

SEQ ID NO: 248 - DNA, 52 bp, synthetic construct
  misc_feature 1..52: note = Synthetic Primer
  misc_difference 21..23: note = n is a, c, g, t or u
  misc_difference 27..29: note = n is a, c, g, t or u
  modified_base 20: mod_base = OTHER; note = uracil
  modified_base 33: mod_base = OTHER; note = uracil
  modified_base 35: mod_base = OTHER; note = uracil
  modified_base 44..45: mod_base = OTHER; note = uracil
  source 1..52: mol_type = other DNA
tctgtacggtgacaaggcgtnnnactnnntgatgtggccaacattcagcagc

SEQ ID NO: 249 - DNA, 52 bp, synthetic construct
  misc_feature 1..52: note = Synthetic Primer
  misc_difference 21..23: note = n is a, c, g, t or u
  misc_difference 27..29: note = n is a, c, g, t or u
  modified_base 20: mod_base = OTHER; note = uracil
  modified_base 33..34: mod_base = OTHER; note = uracil
  modified_base 37..38: mod_base = OTHER; note = uracil
  modified_base 40: mod_base = OTHER; note = uracil
  modified_base 42: mod_base = OTHER; note = uracil
  modified_base 46: mod_base = OTHER; note = uracil
  modified_base 51: mod_base = OTHER; note = uracil
  source 1..52: mol_type = other DNA
tctgtacggtgacaaggcgtnnnactnnntgattggttctctccatcgcctt

SEQ ID NO: 250 - DNA, 52 bp, synthetic construct
  misc_feature 1..52: note = Synthetic Primer
  misc_difference 21..23: note = n is a, c, g, t or u
  misc_difference 27..29: note = n is a, c, g, t or u
  modified_base 20: mod_base = OTHER; note = uracil
  modified_base 33..34: mod_base = OTHER; note = uracil
  modified_base 39: mod_base = OTHER; note = uracil
  modified_base 42..43: mod_base = OTHER; note = uracil
  modified_base 47..48: mod_base = OTHER; note = uracil
  modified_base 51: mod_base = OTHER; note = uracil
  source 1..52: mol_type = other DNA
tctgtacggtgacaaggcgtnnnactnnntgattcagctgcttccgttgctc

SEQ ID NO: 251 - DNA, 52 bp, synthetic construct
  misc_feature 1..52: note = Synthetic Primer
  misc_difference 21..23: note = n is a, c, g, t or u
  misc_difference 27..29: note = n is a, c, g, t or u
  modified_base 20: mod_base = OTHER; note = uracil
  modified_base 33: mod_base = OTHER; note = uracil
  modified_base 35..36: mod_base = OTHER; note = uracil
  modified_base 44: mod_base = OTHER; note = uracil
  modified_base 49: mod_base = OTHER; note = uracil
  source 1..52: mol_type = other DNA
tctgtacggtgacaaggcgtnnnactnnntgatattccgaggctggaatgga

SEQ ID NO: 252 - DNA, 52 bp, synthetic construct
  misc_feature 1..52: note = Synthetic Primer
  misc_difference 21..23: note = n is a, c, g, t or u
  misc_difference 27..29: note = n is a, c, g, t or u
  modified_base 20: mod_base = OTHER; note = uracil
  modified_base 33: mod_base = OTHER; note = uracil
  modified_base 36: mod_base = OTHER; note = uracil
  modified_base 43: mod_base = OTHER; note = uracil
  source 1..52: mol_type = other DNA
tctgtacggtgacaaggcgtnnnactnnntgatcctcagaagtccagcaggc

SEQ ID NO: 253 - DNA, 52 bp, synthetic construct
  misc_feature 1..52: note = Synthetic Primer
  misc_difference 21..23: note = n is a, c, g, t or u
  misc_difference 27..29: note = n is a, c, g, t or u
  modified_base 20: mod_base = OTHER; note = uracil
  modified_base 33: mod_base = OTHER; note = uracil
  modified_base 39: mod_base = OTHER; note = uracil
  modified_base 41: mod_base = OTHER; note = uracil
  source 1..52: mol_type = other DNA
tctgtacggtgacaaggcgtnnnactnnntgatcaggctgtcagagcaggag

SEQ ID NO: 254 - DNA, 52 bp, synthetic construct
  misc_feature 1..52: note = Synthetic Primer
  misc_difference 21..23: note = n is a, c, g, t or u
  misc_difference 27..29: note = n is a, c, g, t or u
  modified_base 20: mod_base = OTHER; note = uracil
  modified_base 33: mod_base = OTHER; note = uracil
  modified_base 35: mod_base = OTHER; note = uracil
  modified_base 43: mod_base = OTHER; note = uracil
  source 1..52: mol_type = other DNA
tctgtacggtgacaaggcgtnnnactnnntgatctgacgagatcgccaacag

SEQ ID NO: 255 - DNA, 52 bp, synthetic construct
  misc_feature 1..52: note = Synthetic Primer
  misc_difference 21..23: note = n is a, c, g, t or u
  misc_difference 27..29: note = n is a, c, g, t or u
  modified_base 20: mod_base = OTHER; note = uracil
  modified_base 33: mod_base = OTHER; note = uracil
  modified_base 35: mod_base = OTHER; note = uracil
  modified_base 47: mod_base = OTHER; note = uracil
  source 1..52: mol_type = other DNA
tctgtacggtgacaaggcgtnnnactnnntgatctggaggaagccatggagc

SEQ ID NO: 256 - DNA, 52 bp, synthetic construct
  misc_feature 1..52: note = Synthetic Primer
  misc_difference 21..23: note = n is a, c, g, t or u
  misc_difference 27..29: note = n is a, c, g, t or u
  modified_base 20: mod_base = OTHER; note = uracil
  modified_base 33..35: mod_base = OTHER; note = uracil
  modified_base 37: mod_base = OTHER; note = uracil
  modified_base 40: mod_base = OTHER; note = uracil
  modified_base 44..45: mod_base = OTHER; note = uracil
  source 1..52: mol_type = other DNA
tctgtacggtgacaaggcgtnnnactnnntgatttctgatggcttgaaggcg

SEQ ID NO: 257 - DNA, 52 bp, synthetic construct
  misc_feature 1..52: note = Synthetic Primer
  misc_difference 21..23: note = n is a, c, g, t or u
  misc_difference 27..29: note = n is a, c, g, t or u
  modified_base 20: mod_base = OTHER; note = uracil
  modified_base 33: mod_base = OTHER; note = uracil
  modified_base 37: mod_base = OTHER; note = uracil
  modified_base 39..41: mod_base = OTHER; note = uracil
  modified_base 44: mod_base = OTHER; note = uracil
  modified_base 49: mod_base = OTHER; note = uracil
  source 1..52: mol_type = other DNA
tctgtacggtgacaaggcgtnnnactnnntgataggtgtttgctgacgtcca

SEQ ID NO: 258 - DNA, 52 bp, synthetic construct
  misc_feature 1..52: note = Synthetic Primer
  misc_difference 21..23: note = n is a, c, g, t or u
  misc_difference 27..29: note = n is a, c, g, t or u
  modified_base 20: mod_base = OTHER; note = uracil
  modified_base 33: mod_base = OTHER; note = uracil
  modified_base 35: mod_base = OTHER; note = uracil
  modified_base 47: mod_base = OTHER; note = uracil
  source 1..52: mol_type = other DNA
tctgtacggtgacaaggcgtnnnactnnntgatgtacaaccagccctccgac

SEQ ID NO: 259 - DNA, 52 bp, synthetic construct
  misc_feature 1..52: note = Synthetic Primer
  misc_difference 21..23: note = n is a, c, g, t or u
  misc_difference 27..29: note = n is a, c, g, t or u
  modified_base 20: mod_base = OTHER; note = uracil
  modified_base 33: mod_base = OTHER; note = uracil
  modified_base 43: mod_base = OTHER; note = uracil
  modified_base 47: mod_base = OTHER; note = uracil
  modified_base 50: mod_base = OTHER; note = uracil
  source 1..52: mol_type = other DNA
tctgtacggtgacaaggcgtnnnactnnntgatgagccagagtccgtcatcg

SEQ ID NO: 260 - DNA, 52 bp, synthetic construct
  misc_feature 1..52: note = Synthetic Primer
  misc_difference 21..23: note = n is a, c, g, t or u
  misc_difference 27..29: note = n is a, c, g, t or u
  modified_base 20: mod_base = OTHER; note = uracil
  modified_base 33: mod_base = OTHER; note = uracil
  modified_base 36: mod_base = OTHER; note = uracil
  modified_base 39: mod_base = OTHER; note = uracil
  modified_base 46: mod_base = OTHER; note = uracil
  modified_base 48: mod_base = OTHER; note = uracil
  source 1..52: mol_type = other DNA
tctgtacggtgacaaggcgtnnnactnnntgatcctggtaccagctctccaa

SEQ ID NO: 261 - DNA, 52 bp, synthetic construct
  misc_feature 1..52: note = Synthetic Primer
  misc_difference 21..23: note = n is a, c, g, t or u
  misc_difference 27..29: note = n is a, c, g, t or u
  modified_base 20: mod_base = OTHER; note = uracil
  modified_base 33: mod_base = OTHER; note = uracil
  modified_base 39..40: mod_base = OTHER; note = uracil
  modified_base 43: mod_base = OTHER; note = uracil
  modified_base 51: mod_base = OTHER; note = uracil
  source 1..52: mol_type = other DNA
tctgtacggtgacaaggcgtnnnactnnntgatccaccttactgcccaggtg

SEQ ID NO: 262 - DNA, 52 bp, synthetic construct
  misc_feature 1..52: note = Synthetic Primer
  misc_difference 21..23: note = n is a, c, g, t or u
  misc_difference 27..29: note = n is a, c, g, t or u
  modified_base 20: mod_base = OTHER; note = uracil
  modified_base 33: mod_base = OTHER; note = uracil
  modified_base 46: mod_base = OTHER; note = uracil
  modified_base 49..50: mod_base = OTHER; note = uracil
  source 1..52: mol_type = other DNA
tctgtacggtgacaaggcgtnnnactnnntgatcacccgccagcatccttag

SEQ ID NO: 263 - DNA, 52 bp, synthetic construct
  misc_feature 1..52: note = Synthetic Primer
  misc_difference 21..23: note = n is a, c, g, t or u
  misc_difference 27..29: note = n is a, c, g, t or u
  modified_base 20: mod_base = OTHER; note = uracil
  modified_base 33: mod_base = OTHER; note = uracil
  modified_base 35: mod_base = OTHER; note = uracil
  modified_base 40: mod_base = OTHER; note = uracil
  modified_base 43: mod_base = OTHER; note = uracil
  modified_base 49: mod_base = OTHER; note = uracil
  source 1..52: mol_type = other DNA
tctgtacggtgacaaggcgtnnnactnnntgatctggactgctcagggtgcc

SEQ ID NO: 264 - DNA, 52 bp, synthetic construct
  misc_feature 1..52: note = Synthetic Primer
  misc_difference 21..23: note = n is a, c, g, t or u
  misc_difference 27..29: note = n is a, c, g, t or u
  modified_base 20: mod_base = OTHER; note = uracil
  modified_base 33: mod_base = OTHER; note = uracil
  modified_base 38: mod_base = OTHER; note = uracil
  modified_base 40: mod_base = OTHER; note = uracil
  modified_base 43: mod_base = OTHER; note = uracil
  modified_base 50: mod_base = OTHER; note = uracil
  source 1..52: mol_type = other DNA
tctgtacggtgacaaggcgtnnnactnnntgatagcctgtcatgagacctcc

SEQ ID NO: 265 - DNA, 52 bp, synthetic construct
  misc_feature 1..52: note = Synthetic Primer
  misc_difference 21..23: note = n is a, c, g, t or u
  misc_difference 27..29: note = n is a, c, g, t or u
  modified_base 20: mod_base = OTHER; note = uracil
  modified_base 33: mod_base = OTHER; note = uracil
  modified_base 37: mod_base = OTHER; note = uracil
  modified_base 39..41: mod_base = OTHER; note = uracil
  modified_base 47: mod_base = OTHER; note = uracil
  modified_base 51: mod_base = OTHER; note = uracil
  source 1..52: mol_type = other DNA
tctgtacggtgacaaggcgtnnnactnnntgatcgctctttccagctggcta

SEQ ID NO: 266 - DNA, 52 bp, synthetic construct
  misc_feature 1..52: note = Synthetic Primer
  misc_difference 21..23: note = n is a, c, g, t or u
  misc_difference 27..29: note = n is a, c, g, t or u
  modified_base 20: mod_base = OTHER; note = uracil
  modified_base 33: mod_base = OTHER; note = uracil
  modified_base 41..42: mod_base = OTHER; note = uracil
  modified_base 47: mod_base = OTHER; note = uracil
  modified_base 49: mod_base = OTHER; note = uracil
  modified_base 51: mod_base = OTHER; note = uracil
  source 1..52: mol_type = other DNA
tctgtacggtgacaaggcgtnnnactnnntgataacgaggttccggtgtgtc

SEQ ID NO: 267 - DNA, 52 bp, synthetic construct
  misc_feature 1..52: note = Synthetic Primer
  misc_difference 21..23: note = n is a, c, g, t or u
  misc_difference 27..29: note = n is a, c, g, t or u
  modified_base 20: mod_base = OTHER; note = uracil
  modified_base 33: mod_base = OTHER; note = uracil
  modified_base 36: mod_base = OTHER; note = uracil
  modified_base 46: mod_base = OTHER; note = uracil
  modified_base 51: mod_base = OTHER; note = uracil
  source 1..52: mol_type = other DNA
tctgtacggtgacaaggcgtnnnactnnntgatgctcccaggacctccacta

SEQ ID NO: 268 - DNA, 52 bp, synthetic construct
  misc_feature 1..52: note = Synthetic Primer
  misc_difference 21..23: note = n is a, c, g, t or u
  misc_difference 27..29: note = n is a, c, g, t or u
  modified_base 20: mod_base = OTHER; note = uracil
  modified_base 33: mod_base = OTHER; note = uracil
  modified_base 43: mod_base = OTHER; note = uracil
  modified_base 45: mod_base = OTHER; note = uracil
  source 1..52: mol_type = other DNA
tctgtacggtgacaaggcgtnnnactnnntgatgcgacacactgtaggcagt

SEQ ID NO: 269 - DNA, 52 bp, synthetic construct
  misc_feature 1..52: note = Synthetic Primer
  misc_difference 21..23: note = n is a, c, g, t or u
  misc_difference 27..29: note = n is a, c, g, t or u
  modified_base 20: mod_base = OTHER; note = uracil
  modified_base 33: mod_base = OTHER; note = uracil
  modified_base 37: mod_base = OTHER; note = uracil
  modified_base 45: mod_base = OTHER; note = uracil
  modified_base 48: mod_base = OTHER; note = uracil
  modified_base 50: mod_base = OTHER; note = uracil
  source 1..52: mol_type = other DNA
tctgtacggtgacaaggcgtnnnactnnntgatacctgggaacctactgtgg

SEQ ID NO: 270 - DNA, 52 bp, synthetic construct
  misc_feature 1..52: note = Synthetic Primer
  misc_difference 21..23: note = n is a, c, g, t or u
  misc_difference 27..29: note = n is a, c, g, t or u
  modified_base 20: mod_base = OTHER; note = uracil
  modified_base 33: mod_base = OTHER; note = uracil
  modified_base 36: mod_base = OTHER; note = uracil
  modified_base 42: mod_base = OTHER; note = uracil
  modified_base 47: mod_base = OTHER; note = uracil
  source 1..52: mol_type = other DNA
tctgtacggtgacaaggcgtnnnactnnntgatcctgaagctggactaccgc

SEQ ID NO: 271 - DNA, 52 bp, synthetic construct
  misc_feature 1..52: note = Synthetic Primer
  misc_difference 21..23: note = n is a, c, g, t or u
  misc_difference 27..29: note = n is a, c, g, t or u
  modified_base 20: mod_base = OTHER; note = uracil
  modified_base 33..34: mod_base = OTHER; note = uracil
  modified_base 36: mod_base = OTHER; note = uracil
  modified_base 42: mod_base = OTHER; note = uracil
  modified_base 51: mod_base = OTHER; note = uracil
  source 1..52: mol_type = other DNA
tctgtacggtgacaaggcgtnnnactnnntgattgtggacctcagcagcatt

SEQ ID NO: 272 - DNA, 52 bp, synthetic construct
  misc_feature 1..52: note = Synthetic Primer
  misc_difference 21..23: note = n is a, c, g, t or u
  misc_difference 27..29: note = n is a, c, g, t or u
  modified_base 20: mod_base = OTHER; note = uracil
  modified_base 33: mod_base = OTHER; note = uracil
  modified_base 38: mod_base = OTHER; note = uracil
  modified_base 42: mod_base = OTHER; note = uracil
  modified_base 44: mod_base = OTHER; note = uracil
  modified_base 48..49: mod_base = OTHER; note = uracil
  source 1..52: mol_type = other DNA
tctgtacggtgacaaggcgtnnnactnnntgatcccgtggctatgccttcat

SEQ ID NO: 273 - DNA, 52 bp, synthetic construct
  misc_feature 1..52: note = Synthetic Primer
  misc_difference 21..23: note = n is a, c, g, t or u
  misc_difference 27..29: note = n is a, c, g, t or u
  modified_base 20: mod_base = OTHER; note = uracil
  modified_base 33: mod_base = OTHER; note = uracil
  modified_base 41..42: mod_base = OTHER; note = uracil
  modified_base 45: mod_base = OTHER; note = uracil
  modified_base 47..48: mod_base = OTHER; note = uracil
  source 1..52: mol_type = other DNA
tctgtacggtgacaaggcgtnnnactnnntgatacagggattcctcttcccc

SEQ ID NO: 274 - DNA, 52 bp, synthetic construct
  misc_feature 1..52: note = Synthetic Primer
  misc_difference 21..23: note = n is a, c, g, t or u
  misc_difference 27..29: note = n is a, c, g, t or u
  modified_base 20: mod_base = OTHER; note = uracil
  modified_base 33: mod_base = OTHER; note = uracil
  modified_base 35: mod_base = OTHER; note = uracil
  modified_base 46: mod_base = OTHER; note = uracil
  source 1..52: mol_type = other DNA
tctgtacggtgacaaggcgtnnnactnnntgatatggcacggaactgaacca

SEQ ID NO: 275 - DNA, 52 bp, synthetic construct
  misc_feature 1..52: note = Synthetic Primer
  misc_difference 21..23: note = n is a, c, g, t or u
  misc_difference 27..29: note = n is a, c, g, t or u
  modified_base 20: mod_base = OTHER; note = uracil
  modified_base 33: mod_base = OTHER; note = uracil
  modified_base 36: mod_base = OTHER; note = uracil
  modified_base 51: mod_base = OTHER; note = uracil
  source 1..52: mol_type = other DNA
tctgtacggtgacaaggcgtnnnactnnntgatcctggagaaccaggacctt

SEQ ID NO: 276 - DNA, 52 bp, synthetic construct
  misc_feature 1..52: note = Synthetic Primer
  misc_difference 21..23: note = n is a, c, g, t or u
  misc_difference 27..29: note = n is a, c, g, t or u
  modified_base 20: mod_base = OTHER; note = uracil
  modified_base 33..36: mod_base = OTHER; note = uracil
  modified_base 47: mod_base = OTHER; note = uracil
  modified_base 50: mod_base = OTHER; note = uracil
  source 1..52: mol_type = other DNA
tctgtacggtgacaaggcgtnnnactnnntgattttgaccgcaagctcctcc

SEQ ID NO: 277 - DNA, 52 bp, synthetic construct
  misc_feature 1..52: note = Synthetic Primer
  misc_difference 21..23: note = n is a, c, g, t or u
  misc_difference 27..29: note = n is a, c, g, t or u
  modified_base 20: mod_base = OTHER; note = uracil
  modified_base 33: mod_base = OTHER; note = uracil
  modified_base 37..38: mod_base = OTHER; note = uracil
  modified_base 45: mod_base = OTHER; note = uracil
  modified_base 48: mod_base = OTHER; note = uracil
  modified_base 51: mod_base = OTHER; note = uracil
  source 1..52: mol_type = other DNA
tctgtacggtgacaaggcgtnnnactnnntgatgccttgcaagctggtcatt

SEQ ID NO: 278 - DNA, 52 bp, synthetic construct
  misc_feature 1..52: note = Synthetic Primer
  misc_difference 21..23: note = n is a, c, g, t or u
  misc_difference 27..29: note = n is a, c, g, t or u
  modified_base 20: mod_base = OTHER; note = uracil
  modified_base 33: mod_base = OTHER; note = uracil
  modified_base 36: mod_base = OTHER; note = uracil
  modified_base 42: mod_base = OTHER; note = uracil
  modified_base 45: mod_base = OTHER; note = uracil
  source 1..52: mol_type = other DNA
tctgtacggtgacaaggcgtnnnactnnntgatgctgggactcgtacgagaa

SEQ ID NO: 279 - DNA, 52 bp, synthetic construct
  misc_feature 1..52: note = Synthetic Primer
  misc_difference 21..23: note = n is a, c, g, t or u
  misc_difference 27..29: note = n is a, c, g, t or u
  modified_base 20: mod_base = OTHER; note = uracil
  modified_base 33: mod_base = OTHER; note = uracil
  modified_base 35: mod_base = OTHER; note = uracil
  modified_base 40: mod_base = OTHER; note = uracil
  modified_base 45: mod_base = OTHER; note = uracil
  source 1..52: mol_type = other DNA
tctgtacggtgacaaggcgtnnnactnnntgatctggcatgacatgcagact

SEQ ID NO: 280 - DNA, 52 bp, synthetic construct
  misc_feature 1..52: note = Synthetic Primer
  misc_difference 21..23: note = n is a, c, g, t or u
  misc_difference 27..29: note = n is a, c, g, t or u
  modified_base 20: mod_base = OTHER; note = uracil
  modified_base 33: mod_base = OTHER; note = uracil
  modified_base 39..40: mod_base = OTHER; note = uracil
  modified_base 48..49: mod_base = OTHER; note = uracil
  source 1..52: mol_type = other DNA
tctgtacggtgacaaggcgtnnnactnnntgatggcccttagagagcttggg

SEQ ID NO: 281 - DNA, 52 bp, synthetic construct
  misc_feature 1..52: note = Synthetic Primer
  misc_difference 21..23: note = n is a, c, g, t or u
  misc_difference 27..29: note = n is a, c, g, t or u
  modified_base 20: mod_base = OTHER; note = uracil
  modified_base 33: mod_base = OTHER; note = uracil
  modified_base 38: mod_base = OTHER; note = uracil
  modified_base 47: mod_base = OTHER; note = uracil
  modified_base 49..50: mod_base = OTHER; note = uracil
  source 1..52: mol_type = other DNA
tctgtacggtgacaaggcgtnnnactnnntgatcgcatacccgccatcttct

SEQ ID NO: 282 - DNA, 52 bp, synthetic construct
  misc_feature 1..52: note = Synthetic Primer
  misc_difference 21..23: note = n is a, c, g, t or u
  misc_difference 27..29: note = n is a, c, g, t or u
  modified_base 20: mod_base = OTHER; note = uracil
  modified_base 33: mod_base = OTHER; note = uracil
  modified_base 35: mod_base = OTHER; note = uracil
  modified_base 41: mod_base = OTHER; note = uracil
  source 1..52: mol_type = other DNA
tctgtacggtgacaaggcgtnnnactnnntgatctgcggatacaaaggcgac

SEQ ID NO: 283 - DNA, 52 bp, synthetic construct
  misc_feature 1..52: note = Synthetic Primer
  misc_difference 21..23: note = n is a, c, g, t or u
  misc_difference 27..29: note = n is a, c, g, t or u
  modified_base 20: mod_base = OTHER; note = uracil
  modified_base 33: mod_base = OTHER; note = uracil
  modified_base 39: mod_base = OTHER; note = uracil
  modified_base 41: mod_base = OTHER; note = uracil
  modified_base 45: mod_base = OTHER; note = uracil
  source 1..52: mol_type = other DNA
tctgtacggtgacaaggcgtnnnactnnntgataaagctgtggctggaaaca

SEQ ID NO: 284 - DNA, 52 bp, synthetic construct
  misc_feature 1..52: note = Synthetic Primer
  misc_difference 21..23: note = n is a, c, g, t or u
  misc_difference 27..29: note = n is a, c, g, t or u
  modified_base 20: mod_base = OTHER; note = uracil
  modified_base 33: mod_base = OTHER; note = uracil
  modified_base 37: mod_base = OTHER; note = uracil
  modified_base 39: mod_base = OTHER; note = uracil
  modified_base 42: mod_base = OTHER; note = uracil
  modified_base 48..49: mod_base = OTHER; note = uracil
  source 1..52: mol_type = other DNA
tctgtacggtgacaaggcgtnnnactnnntgatacatctgctccggcttagc

SEQ ID NO: 285 - DNA, 52 bp, synthetic construct
  misc_feature 1..52: note = Synthetic Primer
  misc_difference 21..23: note = n is a, c, g, t or u
  misc_difference 27..29: note = n is a, c, g, t or u
  modified_base 20: mod_base = OTHER; note = uracil
  modified_base 33: mod_base = OTHER; note = uracil
  modified_base 42..44: mod_base = OTHER; note = uracil
  modified_base 46: mod_base = OTHER; note = uracil
  modified_base 48: mod_base = OTHER; note = uracil
  source 1..52: mol_type = other DNA
tctgtacggtgacaaggcgtnnnactnnntgatgcgacgactttatctgggc

SEQ ID NO: 286 - DNA, 52 bp, synthetic construct
  misc_feature 1..52: note = Synthetic Primer
  misc_difference 21..23: note = n is a, c, g, t or u
  misc_difference 27..29: note = n is a, c, g, t or u
  modified_base 20: mod_base = OTHER; note = uracil
  modified_base 33: mod_base = OTHER; note = uracil
  modified_base 37: mod_base = OTHER; note = uracil
  modified_base 44: mod_base = OTHER; note = uracil
  source 1..52: mol_type = other DNA
tctgtacggtgacaaggcgtnnnactnnntgatcagtgactgctgccacaac

SEQ ID NO: 287 - DNA, 52 bp, synthetic construct
  misc_feature 1..52: note = Synthetic Primer
  misc_difference 21..23: note = n is a, c, g, t or u
  misc_difference 27..29: note = n is a, c, g, t or u
  modified_base 20: mod_base = OTHER; note = uracil
  modified_base 33: mod_base = OTHER; note = uracil
  modified_base 36: mod_base = OTHER; note = uracil
  modified_base 38: mod_base = OTHER; note = uracil
  modified_base 42: mod_base = OTHER; note = uracil
  modified_base 45: mod_base = OTHER; note = uracil
  modified_base 48..49: mod_base = OTHER; note = uracil
  source 1..52: mol_type = other DNA
tctgtacggtgacaaggcgtnnnactnnntgatgctgtacatcctggttggg

SEQ ID NO: 288 - DNA, 52 bp, synthetic construct
  misc_feature 1..52: note = Synthetic Primer
  misc_difference 21..23: note = n is a, c, g, t or u
  misc_difference 27..29: note = n is a, c, g, t or u
  modified_base 20: mod_base = OTHER; note = uracil
  modified_base 33: mod_base = OTHER; note = uracil
  modified_base 46: mod_base = OTHER; note = uracil
  modified_base 48: mod_base = OTHER; note = uracil
  source 1..52: mol_type = other DNA
tctgtacggtgacaaggcgtnnnactnnntgatcaaacccaaccgtgtgacc

SEQ ID NO: 289 - DNA, 52 bp, synthetic construct
  misc_feature 1..52: note = Synthetic Primer
  misc_difference 21..23: note = n is a, c, g, t or u
  misc_difference 27..29: note = n is a, c, g, t or u
  modified_base 20: mod_base = OTHER; note = uracil
  modified_base 33: mod_base = OTHER; note = uracil
  modified_base 42: mod_base = OTHER; note = uracil
  modified_base 44: mod_base = OTHER; note = uracil
  modified_base 50: mod_base = OTHER; note = uracil
  source 1..52: mol_type = other DNA
tctgtacggtgacaaggcgtnnnactnnntgatgccaagcctgtcaccgtag

SEQ ID NO: 290 - DNA, 52 bp, synthetic construct
  misc_feature 1..52: note = Synthetic Primer
  misc_difference 21..23: note = n is a, c, g, t or u
  misc_difference 27..29: note = n is a, c, g, t or u
  modified_base 20: mod_base = OTHER; note = uracil
  modified_base 33..34: mod_base = OTHER; note = uracil
  modified_base 38: mod_base = OTHER; note = uracil
  modified_base 48: mod_base = OTHER; note = uracil
  modified_base 51: mod_base = OTHER; note = uracil
  source 1..52: mol_type = other DNA
tctgtacggtgacaaggcgtnnnactnnntgattgagtgccacaacctcctg

SEQ ID NO: 291 - DNA, 52 bp, synthetic construct
  misc_feature 1..52: note = Synthetic Primer
  misc_difference 21..23: note = n is a, c, g, t or u
  misc_difference 27..29: note = n is a, c, g, t or u
  modified_base 20: mod_base = OTHER; note = uracil
  modified_base 33..34: mod_base = OTHER; note = uracil
  modified_base 37: mod_base = OTHER; note = uracil
  modified_base 41: mod_base = OTHER; note = uracil
  modified_base 48..49: mod_base = OTHER; note = uracil
  source 1..52: mol_type = other DNA
tctgtacggtgacaaggcgtnnnactnnntgattgatggctcccagcttcct

SEQ ID NO: 292 - DNA, 52 bp, synthetic construct
  misc_feature 1..52: note = Synthetic Primer
  misc_difference 21..23: note = n is a, c, g, t or u
  misc_difference 27..29: note = n is a, c, g, t or u
  modified_base 20: mod_base = OTHER; note = uracil
  modified_base 33: mod_base = OTHER; note = uracil
  modified_base 36: mod_base = OTHER; note = uracil
  modified_base 40: mod_base = OTHER; note = uracil
  modified_base 43: mod_base = OTHER; note = uracil
  source 1..52: mol_type = other DNA
tctgtacggtgacaaggcgtnnnactnnntgatgctggatcctcacagagct

SEQ ID NO: 293 - DNA, 52 bp, synthetic construct
  misc_feature 1..52: note = Synthetic Primer
  misc_difference 21..23: note = n is a, c, g, t or u
  misc_difference 27..29: note = n is a, c, g, t or u
  modified_base 20: mod_base = OTHER; note = uracil
  modified_base 33..34: mod_base = OTHER; note = uracil
  modified_base 42: mod_base = OTHER; note = uracil
  modified_base 46: mod_base = OTHER; note = uracil
  source 1..52: mol_type = other DNA
tctgtacggtgacaaggcgtnnnactnnntgattgacgaagtgagtcccaca

SEQ ID NO: 294 - DNA, 53 bp, synthetic construct
  misc_feature 1..53: note = Synthetic Primer
  misc_difference 21..23: note = n is a, c, g, t or u
  misc_difference 27..29: note = n is a, c, g, t or u
  modified_base 20: mod_base = OTHER; note = uracil
  modified_base 33: mod_base = OTHER; note = uracil
  modified_base 47: mod_base = OTHER; note = uracil
  modified_base 50: mod_base = OTHER; note = uracil
  modified_base 52: mod_base = OTHER; note = uracil
  source 1..53: mol_type = other DNA
tctgtacggtgacaaggcgtnnnactnnntgatgaacgggaagccctcatgtc

SEQ ID NO: 295 - DNA, 53 bp, synthetic construct
  misc_feature 1..53: note = Synthetic Primer
  misc_difference 21..23: note = n is a, c, g, t or u
  misc_difference 27..29: note = n is a, c, g, t or u
  modified_base 20: mod_base = OTHER; note = uracil
  modified_base 33: mod_base = OTHER; note = uracil
  modified_base 39: mod_base = OTHER; note = uracil
  modified_base 41: mod_base = OTHER; note = uracil
  modified_base 45: mod_base = OTHER; note = uracil
  source 1..53: mol_type = other DNA
tctgtacggtgacaaggcgtnnnactnnntgatgggactctggatcccagaag

SEQ ID NO: 296 - DNA, 53 bp, synthetic construct
  misc_feature 1..53: note = Synthetic Primer
  misc_difference 21..23: note = n is a, c, g, t or u
  misc_difference 27..29: note = n is a, c, g, t or u
  modified_base 20: mod_base = OTHER; note = uracil
  modified_base 33: mod_base = OTHER; note = uracil
  modified_base 37: mod_base = OTHER; note = uracil
  modified_base 40..41: mod_base = OTHER; note = uracil
  modified_base 43: mod_base = OTHER; note = uracil
  modified_base 52: mod_base = OTHER; note = uracil
  source 1..53: mol_type = other DNA
tctgtacggtgacaaggcgtnnnactnnntgatccctccttctggccaccatg

SEQ ID NO: 297 - DNA, 53 bp, synthetic construct
  misc_feature 1..53: note = Synthetic Primer
  misc_difference 21..23: note = n is a, c, g, t or u
  misc_difference 27..29: note = n is a, c, g, t or u
  modified_base 20: mod_base = OTHER; note = uracil
  modified_base 33..34: mod_base = OTHER; note = uracil
  modified_base 36: mod_base = OTHER; note = uracil
  modified_base 39: mod_base = OTHER; note = uracil
  source 1..53: mol_type = other DNA
tctgtacggtgacaaggcgtnnnactnnntgattgtgctggacacgacaacaa

SEQ ID NO: 298 - DNA, 53 bp, synthetic construct
  misc_feature 1..53: note = Synthetic Primer
  misc_difference 21..23: note = n is a, c, g, t or u
  misc_difference 27..29: note = n is a, c, g, t or u
  modified_base 20: mod_base = OTHER; note = uracil
  modified_base 33: mod_base = OTHER; note = uracil
  modified_base 40: mod_base = OTHER; note = uracil
  modified_base 47: mod_base = OTHER; note = uracil
  source 1..53: mol_type = other DNA
tctgtacggtgacaaggcgtnnnactnnntgatagaccctgaaggatgccagt

SEQ ID NO: 299 - DNA, 53 bp, synthetic construct
  misc_feature 1..53: note = Synthetic Primer
  misc_difference 21..23: note = n is a, c, g, t or u
  misc_difference 27..29: note = n is a, c, g, t or u
  modified_base 20: mod_base = OTHER; note = uracil
  modified_base 33: mod_base = OTHER; note = uracil
  modified_base 37: mod_base = OTHER; note = uracil
  modified_base 40..42: mod_base = OTHER; note = uracil
  modified_base 49: mod_base = OTHER; note = uracil
  modified_base 52: mod_base = OTHER; note = uracil
  source 1..53: mol_type = other DNA
tctgtacggtgacaaggcgtnnnactnnntgatcgatcgtttgcaacctgctc

SEQ ID NO: 300 - DNA, 53 bp, synthetic construct
  misc_feature 1..53: note = Synthetic Primer
  misc_difference 21..23: note = n is a, c, g, t or u
  misc_difference 27..29: note = n is a, c, g, t or u
  modified_base 20: mod_base = OTHER; note = uracil
  modified_base 33..34: mod_base = OTHER; note = uracil
  modified_base 42: mod_base = OTHER; note = uracil
  modified_base 44: mod_base = OTHER; note = uracil
  modified_base 46: mod_base = OTHER; note = uracil
  modified_base 49: mod_base = OTHER; note = uracil
  modified_base 52: mod_base = OTHER; note = uracil
  source 1..53: mol_type = other DNA
tctgtacggtgacaaggcgtnnnactnnntgattgacaggctatgtcctcgtg

SEQ ID NO: 301 - DNA, 53 bp, synthetic construct
  misc_feature 1..53: note = Synthetic Primer
  misc_difference 21..23: note = n is a, c, g, t or u
  misc_difference 27..29: note = n is a, c, g, t or u
  modified_base 20: mod_base = OTHER; note = uracil
  modified_base 33: mod_base = OTHER; note = uracil
  modified_base 48: mod_base = OTHER; note = uracil
  modified_base 52: mod_base = OTHER; note = uracil
  source 1..53: mol_type = other DNA
tctgtacggtgacaaggcgtnnnactnnntgatggcacaagaggccctagatt

SEQ ID NO: 302 - DNA, 53 bp, synthetic construct
  misc_feature 1..53: note = Synthetic Primer
  misc_difference 21..23: note = n is a, c, g, t or u
  misc_difference 27..29: note = n is a, c, g, t or u
  modified_base 20: mod_base = OTHER; note = uracil
  modified_base 33: mod_base = OTHER; note = uracil
  modified_base 43: mod_base = OTHER; note = uracil
  modified_base 45..47: mod_base = OTHER; note = uracil
  source 1..53: mol_type = other DNA
tctgtacggtgacaaggcgtnnnactnnntgatgggaccagctctttcggaac

SEQ ID NO: 303 - DNA, 53 bp, synthetic construct
  misc_feature 1..53: note = Synthetic Primer
  misc_difference 21..23: note = n is a, c, g, t or u
  misc_difference 27..29: note = n is a, c, g, t or u
  modified_base 20: mod_base = OTHER; note = uracil
  modified_base 33: mod_base = OTHER; note = uracil
  modified_base 36: mod_base = OTHER; note = uracil
  modified_base 42: mod_base = OTHER; note = uracil
  modified_base 45..46: mod_base = OTHER; note = uracil
  modified_base 50: mod_base = OTHER; note = uracil
  modified_base 52: mod_base = OTHER; note = uracil
  source 1..53: mol_type = other DNA
tctgtacggtgacaaggcgtnnnactnnntgatggtgaaggtgcttggatctg

SEQ ID NO: 304 - DNA, 53 bp, synthetic construct
  misc_feature 1..53: note = Synthetic Primer
  misc_difference 21..23: note = n is a, c, g, t or u
  misc_difference 27..29: note = n is a, c, g, t or u
  modified_base 20: mod_base = OTHER; note = uracil
  modified_base 33..34: mod_base = OTHER; note = uracil
  modified_base 36..37: mod_base = OTHER; note = uracil
  modified_base 48: mod_base = OTHER; note = uracil
  source 1..53: mol_type = other DNA
tctgtacggtgacaaggcgtnnnactnnntgattcttcagcaggaagtaccgt

SEQ ID NO: 305 - DNA, 53 bp, synthetic construct
  misc_feature 1..53: note = Synthetic Primer
  misc_difference 21..23: note = n is a, c, g, t or u
  misc_difference 27..29: note = n is a, c, g, t or u
  modified_base 20: mod_base = OTHER; note = uracil
  modified_base 33: mod_base = OTHER; note = uracil
  modified_base 35: mod_base = OTHER; note = uracil
  modified_base 40: mod_base = OTHER; note = uracil
  source 1..53: mol_type = other DNA
tctgtacggtgacaaggcgtnnnactnnntgatctgaggtggaagagacaggc

SEQ ID NO: 306 - DNA, 53 bp, synthetic construct
  misc_feature 1..53: note = Synthetic Primer
  misc_difference 21..23: note = n is a, c, g, t or u
  misc_difference 27..29: note = n is a, c, g, t or u
  modified_base 20: mod_base = OTHER; note = uracil
  modified_base 33..34: mod_base = OTHER; note = uracil
  modified_base 43: mod_base = OTHER; note = uracil
  modified_base 45..46: mod_base = OTHER; note = uracil
  modified_base 52: mod_base = OTHER; note = uracil
  source 1..53: mol_type = other DNA
tctgtacggtgacaaggcgtnnnactnnntgattggaggagctcttcaagctg

SEQ ID NO: 307 - DNA, 53 bp, synthetic construct
  misc_feature 1..53: note = Synthetic Primer
  misc_difference 21..23: note = n is a, c, g, t or u
  misc_difference 27..29: note = n is a, c, g, t or u
  modified_base 20: mod_base = OTHER; note = uracil
  modified_base 33: mod_base = OTHER; note = uracil
  modified_base 46: mod_base = OTHER; note = uracil
  modified_base 50: mod_base = OTHER; note = uracil
  source 1..53: mol_type = other DNA
tctgtacggtgacaaggcgtnnnactnnntgatgaagacccaagctgcctgac

SEQ ID NO: 308 - DNA, 53 bp, synthetic construct
  misc_feature 1..53: note = Synthetic Primer
  misc_difference 21..23: note = n is a, c, g, t or u
  misc_difference 27..29: note = n is a, c, g, t or u
  modified_base 20: mod_base = OTHER; note = uracil
  modified_base 33: mod_base = OTHER; note = uracil
  modified_base 37: mod_base = OTHER; note = uracil
  modified_base 39..40: mod_base = OTHER; note = uracil
  modified_base 42: mod_base = OTHER; note = uracil
  source 1..53: mol_type = other DNA
tctgtacggtgacaaggcgtnnnactnnntgatggctgttgtgaaaaggacgg

SEQ ID NO: 309 - DNA, 53 bp, synthetic construct
  misc_feature 1..53: note = Synthetic Primer
  misc_difference 21..23: note = n is a, c, g, t or u
  misc_difference 27..29: note = n is a, c, g, t or u
  modified_base 20: mod_base = OTHER; note = uracil
  modified_base 33..34: mod_base = OTHER; note = uracil
  modified_base 36: mod_base = OTHER; note = uracil
  modified_base 39: mod_base = OTHER; note = uracil
  modified_base 43: mod_base = OTHER; note = uracil
  modified_base 50: mod_base = OTHER; note = uracil
  source 1..53: mol_type = other DNA
tctgtacggtgacaaggcgtnnnactnnntgattgtgctacatacgggctgaa

SEQ ID NO: 310 - DNA, 53 bp, synthetic construct
  misc_feature 1..53: note = Synthetic Primer
  misc_difference 21..23: note = n is a, c, g, t or u
  misc_difference 27..29: note = n is a, c, g, t or u
  modified_base 20: mod_base = OTHER; note = uracil
  modified_base 33: mod_base = OTHER; note = uracil
  modified_base 40..41: mod_base = OTHER; note = uracil
  modified_base 45: mod_base = OTHER; note = uracil
  modified_base 47: mod_base = OTHER; note = uracil
  modified_base 49: mod_base = OTHER; note = uracil
  source 1..53: mol_type = other DNA
tctgtacggtgacaaggcgtnnnactnnntgataggccattggctctatggaa

SEQ ID NO: 311 - DNA, 53 bp, synthetic construct
  misc_feature 1..53: note = Synthetic Primer
  misc_difference 21..23: note = n is a, c, g, t or u
  misc_difference 27..29: note = n is a, c, g, t or u
  modified_base 20: mod_base = OTHER; note = uracil
  modified_base 33: mod_base = OTHER; note = uracil
  modified_base 39: mod_base = OTHER; note = uracil
  modified_base 41: mod_base = OTHER; note = uracil
  modified_base 49: mod_base = OTHER; note = uracil
  source 1..53: mol_type = other DNA
tctgtacggtgacaaggcgtnnnactnnntgatgaggctatcacaagctgcac

SEQ ID NO: 312 - DNA, 53 bp, synthetic construct
  misc_feature 1..53: note = Synthetic Primer
  misc_difference 21..23: note = n is a, c, g, t or u
  misc_difference 27..29: note = n is a, c, g, t or u
  modified_base 20: mod_base = OTHER; note = uracil
  modified_base 33: mod_base = OTHER; note = uracil
  modified_base 37: mod_base = OTHER; note = uracil
  modified_base 39: mod_base = OTHER; note = uracil
  modified_base 41: mod_base = OTHER; note = uracil
  modified_base 45: mod_base = OTHER; note = uracil
  modified_base 47: mod_base = OTHER; note = uracil
  modified_base 50: mod_base = OTHER; note = uracil
  source 1..53: mol_type = other DNA
tctgtacggtgacaaggcgtnnnactnnntgatccatgtctggctgtgatgct

SEQ ID NO: 313 - DNA, 53 bp, synthetic construct
  misc_feature 1..53: note = Synthetic Primer
  misc_difference 21..23: note = n is a, c, g, t or u
  misc_difference 27..29: note = n is a, c, g, t or u
  modified_base 20: mod_base = OTHER; note = uracil
  modified_base 33: mod_base = OTHER; note = uracil
  modified_base 35: mod_base = OTHER; note = uracil
  modified_base 40: mod_base = OTHER; note = uracil
  source 1..53: mol_type = other DNA
tctgtacggtgacaaggcgtnnnactnnntgatatgacgtaccaaacaggcac

SEQ ID NO: 314 - DNA, 53 bp, synthetic construct
  misc_feature 1..53: note = Synthetic Primer
  misc_difference 21..23: note = n is a, c, g, t or u
  misc_difference 27..29: note = n is a, c, g, t or u
  modified_base 20: mod_base = OTHER; note = uracil
  modified_base 33..34: mod_base = OTHER; note = uracil
  modified_base 39..40: mod_base = OTHER; note = uracil
  modified_base 46: mod_base = OTHER; note = uracil
  modified_base 49: mod_base = OTHER; note = uracil
  source 1..53: mol_type = other DNA
tctgtacggtgacaaggcgtnnnactnnntgattccggttcccactgatgaca

SEQ ID NO: 315 - DNA, 53 bp, synthetic construct
  misc_feature 1..53: note = Synthetic Primer
  misc_difference 21..23: note = n is a, c, g, t or u
  misc_difference 27..29: note = n is a, c, g, t or u
  modified_base 20: mod_base = OTHER; note = uracil
  modified_base 33: mod_base = OTHER; note = uracil
  modified_base 35: mod_base = OTHER; note = uracil
  modified_base 38..39: mod_base = OTHER; note = uracil
  source 1..53: mol_type = other DNA
tctgtacggtgacaaggcgtnnnactnnntgatgtcattcagcaccagaggca

SEQ ID NO: 316 - DNA, 53 bp, synthetic construct
  misc_feature 1..53: note = Synthetic Primer
  misc_difference 21..23: note = n is a, c, g, t or u
  misc_difference 27..29: note = n is a, c, g, t or u
  modified_base 20: mod_base = OTHER; note = uracil
  modified_base 33: mod_base = OTHER; note = uracil
  modified_base 38: mod_base = OTHER; note = uracil
  modified_base 41: mod_base = OTHER; note = uracil
  modified_base 45..46: mod_base = OTHER; note = uracil
  source 1..53: mol_type = other DNA
tctgtacggtgacaaggcgtnnnactnnntgatgagctgctcagttacagcag

SEQ ID NO: 317 - DNA, 53 bp, synthetic construct
  misc_feature 1..53: note = Synthetic Primer
  misc_difference 21..23: note = n is a, c, g, t or u
  misc_difference 27..29: note = n is a, c, g, t or u
  modified_base 20: mod_base = OTHER; note = uracil
  modified_base 33: mod_base = OTHER; note = uracil
  modified_base 38: mod_base = OTHER; note = uracil
  modified_base 40: mod_base = OTHER; note = uracil
  modified_base 42: mod_base = OTHER; note = uracil
  modified_base 50: mod_base = OTHER; note = uracil
  source 1..53: mol_type = other DNA
tctgtacggtgacaaggcgtnnnactnnntgatgaaatctctggccaactccg

SEQ ID NO: 318 - DNA, 53 bp, synthetic construct
  misc_feature 1..53: note = Synthetic Primer
  misc_difference 21..23: note = n is a, c, g, t or u
  misc_difference 27..29: note = n is a, c, g, t or u
  modified_base 20: mod_base = OTHER; note = uracil
  modified_base 33: mod_base = OTHER; note = uracil
  modified_base 37: mod_base = OTHER; note = uracil
  modified_base 44: mod_base = OTHER; note = uracil
  source 1..53: mol_type = other DNA
tctgtacggtgacaaggcgtnnnactnnntgatccatgcagaatgccaccaag

SEQ ID NO: 319 - DNA, 53 bp, synthetic construct
  misc_feature 1..53: note = Synthetic Primer
  misc_difference 21..23: note = n is a, c, g, t or u
  misc_difference 27..29: note = n is a, c, g, t or u
  modified_base 20: mod_base = OTHER; note = uracil
  modified_base 33: mod_base = OTHER; note = uracil
  modified_base 38: mod_base = OTHER; note = uracil
  modified_base 41..42: mod_base = OTHER; note = uracil
  source 1..53: mol_type = other DNA
tctgtacggtgacaaggcgtnnnactnnntgatgcactccttggagcaaaagc

SEQ ID NO: 320 - DNA, 53 bp, synthetic construct
  misc_feature 1..53: note = Synthetic Primer
  misc_difference 21..23: note = n is a, c, g, t or u
  misc_difference 27..29: note = n is a, c, g, t or u
  modified_base 20: mod_base = OTHER; note = uracil
  modified_base 33: mod_base = OTHER; note = uracil
  modified_base 35..36: mod_base = OTHER; note = uracil
  modified_base 38..39: mod_base = OTHER; note = uracil
  modified_base 44: mod_base = OTHER; note = uracil
  source 1..53: mol_type = other DNA
tctgtacggtgacaaggcgtnnnactnnntgatcttgttggcctggcagaaaa

SEQ ID NO: 321 - DNA, 53 bp, synthetic construct
  misc_feature 1..53: note = Synthetic Primer
  misc_difference 21..23: note = n is a, c, g, t or u
  misc_difference 27..29: note = n is a, c, g, t or u
  modified_base 20: mod_base = OTHER; note = uracil
  modified_base 33: mod_base = OTHER; note = uracil
  modified_base 44..45: mod_base = OTHER; note = uracil
  modified_base 50: mod_base = OTHER; note = uracil
  source 1..53: mol_type = other DNA
tctgtacggtgacaaggcgtnnnactnnntgatgagaaggagattgccctgct

SEQ ID NO: 322 - DNA, 53 bp, synthetic construct
  misc_feature 1..53: note = Synthetic Primer
  misc_difference 21..23: note = n is a, c, g, t or u
  misc_difference 27..29: note = n is a, c, g, t or u
  modified_base 20: mod_base = OTHER; note = uracil
  modified_base 33: mod_base = OTHER; note = uracil
  modified_base 35: mod_base = OTHER; note = uracil
  modified_base 41..43: mod_base = OTHER; note = uracil
  source 1..53: mol_type = other DNA
tctgtacggtgacaaggcgtnnnactnnntgatgtcacagtttgaggcacagg

SEQ ID NO: 323 - DNA, 53 bp, synthetic construct
  misc_feature 1..53: note = Synthetic Primer
  misc_difference 21..23: note = n is a, c, g, t or u
  misc_difference 27..29: note = n is a, c, g, t or u
  modified_base 20: mod_base = OTHER; note = uracil
  modified_base 33: mod_base = OTHER; note = uracil
  modified_base 37: mod_base = OTHER; note = uracil
  modified_base 39: mod_base = OTHER; note = uracil
  modified_base 42..43: mod_base = OTHER; note = uracil
  source 1..53: mol_type = other DNA
tctgtacggtgacaaggcgtnnnactnnntgatccctctcattgaccggaacc

SEQ ID NO: 324 - DNA, 53 bp, synthetic construct
  misc_feature 1..53: note = Synthetic Primer
  misc_difference 21..23: note = n is a, c, g, t or u
  misc_difference 27..29: note = n is a, c, g, t or u
  modified_base 20: mod_base = OTHER; note = uracil
  modified_base 33: mod_base = OTHER; note = uracil
  modified_base 38: mod_base = OTHER; note = uracil
  modified_base 40: mod_base = OTHER; note = uracil
  modified_base 43: mod_base = OTHER; note = uracil
  modified_base 51: mod_base = OTHER; note = uracil
  source 1..53: mol_type = other DNA
tctgtacggtgacaaggcgtnnnactnnntgatcagctctcatcggccaatca

SEQ ID NO: 325 - DNA, 53 bp, synthetic construct
  misc_feature 1..53: note = Synthetic Primer
  misc_difference 21..23: note = n is a, c, g, t or u
  misc_difference 27..29: note = n is a, c, g, t or u
  modified_base 20: mod_base = OTHER; note = uracil
  modified_base 33: mod_base = OTHER; note = uracil
  modified_base 36..37: mod_base = OTHER; note = uracil
  modified_base 39: mod_base = OTHER; note = uracil
  source 1..53: mol_type = other DNA
tctgtacggtgacaaggcgtnnnactnnntgatccttctggaccaagacgact

SEQ ID NO: 326 - DNA, 53 bp, synthetic construct
  misc_feature 1..53: note = Synthetic Primer
  misc_difference 21..23: note = n is a, c, g, t or u
  misc_difference 27..29: note = n is a, c, g, t or u
  modified_base 20: mod_base = OTHER; note = uracil
  modified_base 33: mod_base = OTHER; note = uracil
  modified_base 39: mod_base = OTHER; note = uracil
  modified_base 47: mod_base = OTHER; note = uracil
  modified_base 50: mod_base = OTHER; note = uracil
  modified_base 52: mod_base = OTHER; note = uracil
  source 1..53: mol_type = other DNA
tctgtacggtgacaaggcgtnnnactnnntgatccccatccagacctactctg

SEQ ID NO: 327 - DNA, 53 bp, synthetic construct
  misc_feature 1..53: note = Synthetic Primer
  misc_difference 21..23: note = n is a, c, g, t or u
  misc_difference 27..29: note = n is a, c, g, t or u
  modified_base 20: mod_base = OTHER; note = uracil
  modified_base 33: mod_base = OTHER; note = uracil
  modified_base 36: mod_base = OTHER; note = uracil
  modified_base 42: mod_base = OTHER; note = uracil
  modified_base 52: mod_base = OTHER; note = uracil
  source 1..53: mol_type = other DNA
tctgtacggtgacaaggcgtnnnactnnntgatcctgccgctaaagaagggtc

SEQ ID NO: 328 - DNA, 53 bp, synthetic construct
  misc_feature 1..53: note = Synthetic Primer
  misc_difference 21..23: note = n is a, c, g, t or u
  misc_difference 27..29: note = n is a, c, g, t or u
  modified_base 20: mod_base = OTHER; note = uracil
  modified_base 33: mod_base = OTHER; note = uracil
  modified_base 35: mod_base = OTHER; note = uracil
  modified_base 40: mod_base = OTHER; note = uracil
  modified_base 42: mod_base = OTHER; note = uracil
  modified_base 44: mod_base = OTHER; note = uracil
  modified_base 48: mod_base = OTHER; note = uracil
  modified_base 51..52: mod_base = OTHER; note = uracil
  source 1..53: mol_type = other DNA
tctgtacggtgacaaggcgtnnnactnnntgatctggcatctctcgctggttt

SEQ ID NO: 329 - DNA, 53 bp, synthetic construct
  misc_feature 1..53: note = Synthetic Primer
  misc_difference 21..23: note = n is a, c, g, t or u
  misc_difference 27..29: note = n is a, c, g, t or u
  modified_base 20: mod_base = OTHER; note = uracil
  modified_base 33..34: mod_base = OTHER; note = uracil
  modified_base 37: mod_base = OTHER; note = uracil
  modified_base 39: mod_base = OTHER; note = uracil
  modified_base 42: mod_base = OTHER; note = uracil
  modified_base 49..50: mod_base = OTHER; note = uracil
  source 1..53: mol_type = other DNA
tctgtacggtgacaaggcgtnnnactnnntgattggtgtcatccagccttagc

SEQ ID NO: 330 - DNA, 53 bp, synthetic construct
  misc_feature 1..53: note = Synthetic Primer
  misc_difference 21..23: note = n is a, c, g, t or u
  misc_difference 27..29: note = n is a, c, g, t or u
  modified_base 20: mod_base = OTHER; note = uracil
  modified_base 33: mod_base = OTHER; note = uracil
  modified_base 36: mod_base = OTHER; note = uracil
  modified_base 48: mod_base = OTHER; note = uracil
  source 1..53: mol_type = other DNA
tctgtacggtgacaaggcgtnnnactnnntgatcataccagaggcaatccgca

SEQ ID NO: 331 - DNA, 53 bp, synthetic construct
  misc_feature 1..53: note = Synthetic Primer
  misc_difference 21..23: note = n is a, c, g, t or u
  misc_difference 27..29: note = n is a, c, g, t or u
  modified_base 20: mod_base = OTHER; note = uracil
  modified_base 33: mod_base = OTHER; note = uracil
  modified_base 46: mod_base = OTHER; note = uracil
  modified_base 49: mod_base = OTHER; note = uracil
  modified_base 52: mod_base = OTHER; note = uracil
  source 1..53: mol_type = other DNA
tctgtacggtgacaaggcgtnnnactnnntgatcacagccggaggtcatactg

SEQ ID NO: 332 - DNA, 53 bp, synthetic construct
  misc_feature 1..53: note = Synthetic Primer
  misc_difference 21..23: note = n is a, c, g, t or u
  misc_difference 27..29: note = n is a, c, g, t or u
  modified_base 20: mod_base = OTHER; note = uracil
  modified_base 33: mod_base = OTHER; note = uracil
  modified_base 38: mod_base = OTHER; note = uracil
  modified_base 41: mod_base = OTHER; note = uracil
  modified_base 45: mod_base = OTHER; note = uracil
  source 1..53: mol_type = other DNA
tctgtacggtgacaaggcgtnnnactnnntgatcggatagtggatcccaacgg

SEQ ID NO: 333 - DNA, 53 bp, synthetic construct
  misc_feature 1..53: note = Synthetic Primer
  misc_difference 21..23: note = n is a, c, g, t or u
  misc_difference 27..29: note = n is a, c, g, t or u
  modified_base 20: mod_base = OTHER; note = uracil
  modified_base 33: mod_base = OTHER; note = uracil
  modified_base 46: mod_base = OTHER; note = uracil
  modified_base 51..52: mod_base = OTHER; note = uracil
  source 1..53: mol_type = other DNA
tctgtacggtgacaaggcgtnnnactnnntgatccagcagaggcataaggttc

SEQ ID NO: 334 - DNA, 53 bp, synthetic construct
  misc_feature 1..53: note = Synthetic Primer
  misc_difference 21..23: note = n is a, c, g, t or u
  misc_difference 27..29: note = n is a, c, g, t or u
  modified_base 20: mod_base = OTHER; note = uracil
  modified_base 33: mod_base = OTHER; note = uracil
  modified_base 43: mod_base = OTHER; note = uracil
  modified_base 45: mod_base = OTHER; note = uracil
  modified_base 47..48: mod_base = OTHER; note = uracil
  source 1..53: mol_type = other DNA
tctgtacggtgacaaggcgtnnnactnnntgatgaaaacgcctgtgttccacc

SEQ ID NO: 335 - DNA, 53 bp, synthetic construct
  misc_feature 1..53: note = Synthetic Primer
  misc_difference 21..23: note = n is a, c, g, t or u
  misc_difference 27..29: note = n is a, c, g, t or u
  modified_base 20: mod_base = OTHER; note = uracil
  modified_base 33..35: mod_base = OTHER; note = uracil
  modified_base 44: mod_base = OTHER; note = uracil
  modified_base 51: mod_base = OTHER; note = uracil
  source 1..53: mol_type = other DNA
tctgtacggtgacaaggcgtnnnactnnntgatttccggcaaatcacagatcg

SEQ ID NO: 336 - DNA, 53 bp, synthetic construct
  misc_feature 1..53: note = Synthetic Primer
  misc_difference 21..23: note = n is a, c, g, t or u
  misc_difference 27..29: note = n is a, c, g, t or u
  modified_base 20: mod_base = OTHER; note = uracil
  modified_base 33: mod_base = OTHER; note = uracil
  modified_base 35: mod_base = OTHER; note = uracil
  modified_base 37: mod_base = OTHER; note = uracil
  modified_base 42: mod_base = OTHER; note = uracil
  modified_base 44: mod_base = OTHER; note = uracil
  modified_base 49..50: mod_base = OTHER; note = uracil
  modified_base 52: mod_base = OTHER; note = uracil
  source 1..53: mol_type = other DNA
tctgtacggtgacaaggcgtnnnactnnntgatgtctccggtgtggagttctg

SEQ ID NO: 337 - DNA, 53 bp, synthetic construct
  misc_feature 1..53: note = Synthetic Primer
  misc_difference 21..23: note = n is a, c, g, t or u
  misc_difference 27..29: note = n is a, c, g, t or u
  modified_base 20: mod_base = OTHER; note = uracil
  modified_base 33: mod_base = OTHER; note = uracil
  modified_base 41..42: mod_base = OTHER; note = uracil
  modified_base 50: mod_base = OTHER; note = uracil
  source 1..53: mol_type = other DNA
tctgtacggtgacaaggcgtnnnactnnntgatggcaacattgaaagcctcgt

SEQ ID NO: 338 - DNA, 53 bp, synthetic construct
  misc_feature 1..53: note = Synthetic Primer
  misc_difference 21..23: note = n is a, c, g, t or u
  misc_difference 27..29: note = n is a, c, g, t or u
  modified_base 20: mod_base = OTHER; note = uracil
  modified_base 33: mod_base = OTHER; note = uracil
  modified_base 47: mod_base = OTHER; note = uracil
  modified_base 50: mod_base = OTHER; note = uracil
  source 1..53: mol_type = other DNA
tctgtacggtgacaaggcgtnnnactnnntgatcacacaagggaggtcctcaa

SEQ ID NO: 339 - DNA, 53 bp, synthetic construct
  misc_feature 1..53: note = Synthetic Primer
  misc_difference 21..23: note = n is a, c, g, t or u
  misc_difference 27..29: note = n is a, c, g, t or u
  modified_base 20: mod_base = OTHER; note = uracil
  modified_base 33: mod_base = OTHER; note = uracil
  modified_base 46: mod_base = OTHER; note = uracil
  modified_base 52: mod_base = OTHER; note = uracil
  source 1..53: mol_type = other DNA
tctgtacggtgacaaggcgtnnnactnnntgatggacgacgaggatgaggatg

SEQ ID NO: 340 - DNA, 53 bp, synthetic construct
  misc_feature 1..53: note = Synthetic Primer
  misc_difference 21..23: note = n is a, c, g, t or u
  misc_difference 27..29: note = n is a, c, g, t or u
  modified_base 20: mod_base = OTHER; note = uracil
  modified_base 33: mod_base = OTHER; note = uracil
  modified_base 49: mod_base = OTHER; note = uracil
  modified_base 52: mod_base = OTHER; note = uracil
  source 1..53: mol_type = other DNA
tctgtacggtgacaaggcgtnnnactnnntgatccgaacagaaacccctcctc

SEQ ID NO: 341 - DNA, 53 bp, synthetic construct
  misc_feature 1..53: note = Synthetic Primer
  misc_difference 21..23: note = n is a, c, g, t or u
  misc_difference 27..29: note = n is a, c, g, t or u
  modified_base 20: mod_base = OTHER; note = uracil
  modified_base 33..34: mod_base = OTHER; note = uracil
  modified_base 37: mod_base = OTHER; note = uracil
  modified_base 41: mod_base = OTHER; note = uracil
  modified_base 46: mod_base = OTHER; note = uracil
  modified_base 50: mod_base = OTHER; note = uracil
  source 1..53: mol_type = other DNA
tctgtacggtgacaaggcgtnnnactnnntgattcctgcatccaatggatgct

SEQ ID NO: 342 - DNA, 53 bp, synthetic construct
  misc_feature 1..53: note = Synthetic Primer
  misc_difference 21..23: note = n is a, c, g, t or u
  misc_difference 27..29: note = n is a, c, g, t or u
  modified_base 20: mod_base = OTHER; note = uracil
  modified_base 33..34: mod_base = OTHER; note = uracil
  modified_base 36: mod_base = OTHER; note = uracil
  modified_base 38: mod_base = OTHER; note = uracil
  modified_base 40..41: mod_base = OTHER; note = uracil
  modified_base 44: mod_base = OTHER; note = uracil
  modified_base 51: mod_base = OTHER; note = uracil
  source 1..53: mol_type = other DNA
tctgtacggtgacaaggcgtnnnactnnntgattgtctcttcatggccagtgc

SEQ ID NO: 343 - DNA, 53 bp, synthetic construct
  misc_feature 1..53: note = Synthetic Primer
  misc_difference 21..23: note = n is a, c, g, t or u
  misc_difference 27..29: note = n is a, c, g, t or u
  modified_base 20: mod_base = OTHER; note = uracil
  modified_base 33..34: mod_base = OTHER; note = uracil
  modified_base 37: mod_base = OTHER; note = uracil
  modified_base 46: mod_base = OTHER; note = uracil
  source 1..53: mol_type = other DNA
tctgtacggtgacaaggcgtnnnactnnntgattgatggagaggctgaagcag

SEQ ID NO: 344 - DNA, 53 bp, synthetic construct
  misc_feature 1..53: note = Synthetic Primer
  misc_difference 21..23: note = n is a, c, g, t or u
  misc_difference 27..29: note = n is a, c, g, t or u
  modified_base 20: mod_base = OTHER; note = uracil
  modified_base 33: mod_base = OTHER; note = uracil
  modified_base 42: mod_base = OTHER; note = uracil
  modified_base 51: mod_base = OTHER; note = uracil
  source 1..53: mol_type = other DNA
tctgtacggtgacaaggcgtnnnactnnntgatcgaagccatcaaacagctgc

SEQ ID NO: 345 - DNA, 53 bp, synthetic construct
  misc_feature 1..53: note = Synthetic Primer
  misc_difference 21..23: note = n is a, c, g, t or u
  misc_difference 27..29: note = n is a, c, g, t or u
  modified_base 20: mod_base = OTHER; note = uracil
  modified_base 33: mod_base = OTHER; note = uracil
  modified_base 36..37: mod_base = OTHER; note = uracil
  modified_base 41: mod_base = OTHER; note = uracil
  source 1..53: mol_type = other DNA
tctgtacggtgacaaggcgtnnnactnnntgatccttacatacccagcaccga

SEQ ID NO: 346 - DNA, 53 bp, synthetic construct
  misc_feature 1..53: note = Synthetic Primer
  misc_difference 21..23: note = n is a, c, g, t or u
  misc_difference 27..29: note = n is a, c, g, t or u
  modified_base 20: mod_base = OTHER; note = uracil
  modified_base 33: mod_base = OTHER; note = uracil
  modified_base 37..38: mod_base = OTHER; note = uracil
  modified_base 40: mod_base = OTHER; note = uracil
  modified_base 42: mod_base = OTHER; note = uracil
  modified_base 46: mod_base = OTHER; note = uracil
  source 1..53: mol_type = other DNA
tctgtacggtgacaaggcgtnnnactnnntgataccttgtgtcaatggaggca

SEQ ID NO: 347 - DNA, 53 bp, synthetic construct
  misc_feature 1..53: note = Synthetic Primer
  misc_difference 21..23: note = n is a, c, g, t or u
  misc_difference 27..29: note = n is a, c, g, t or u
  modified_base 20: mod_base = OTHER; note = uracil
  modified_base 33: mod_base = OTHER; note = uracil
  modified_base 41: mod_base = OTHER; note = uracil
  modified_base 48: mod_base = OTHER; note = uracil
  modified_base 50: mod_base = OTHER; note = uracil
  source 1..53: mol_type = other DNA
tctgtacggtgacaaggcgtnnnactnnntgatcacagcatcaaggatgtgca

SEQ ID NO: 348 - DNA, 53 bp, synthetic construct
  misc_feature 1..53: note = Synthetic Primer
  misc_difference 21..23: note = n is a, c, g, t or u
  misc_difference 27..29: note = n is a, c, g, t or u
  modified_base 20: mod_base = OTHER; note = uracil
  modified_base 33: mod_base = OTHER; note = uracil
  modified_base 39: mod_base = OTHER; note = uracil
  modified_base 43: mod_base = OTHER; note = uracil
  modified_base 49..50: mod_base = OTHER; note = uracil
  modified_base 52: mod_base = OTHER; note = uracil
  source 1..53: mol_type = other DNA
tctgtacggtgacaaggcgtnnnactnnntgatcccaatacctgcagcttctg

SEQ ID NO: 349 - DNA, 53 bp, synthetic construct
  misc_feature 1..53: note = Synthetic Primer
  misc_difference 21..23: note = n is a, c, g, t or u
  misc_difference 27..29: note = n is a, c, g, t or u
  modified_base 20: mod_base = OTHER; note = uracil
  modified_base 33: mod_base = OTHER; note = uracil
  modified_base 37: mod_base = OTHER; note = uracil
  modified_base 45..46: mod_base = OTHER; note = uracil
  source 1..53: mol_type = other DNA
tctgtacggtgacaaggcgtnnnactnnntgatcactaccaggattgccaacc

SEQ ID NO: 350 - DNA, 53 bp, synthetic construct
  misc_feature 1..53: note = Synthetic Primer
  misc_difference 21..23: note = n is a, c, g, t or u
  misc_difference 27..29: note = n is a, c, g, t or u
  modified_base 20: mod_base = OTHER; note = uracil
  modified_base 33: mod_base = OTHER; note = uracil
  modified_base 38: mod_base = OTHER; note = uracil
  modified_base 45..47: mod_base = OTHER; note = uracil
  modified_base 50: mod_base = OTHER; note = uracil
  source 1..53: mol_type = other DNA
tctgtacggtgacaaggcgtnnnactnnntgatgggatggaaactttgctgct

SEQ ID NO: 351 - DNA, 53 bp, synthetic construct
  misc_feature 1..53: note = Synthetic Primer
  misc_difference 21..23: note = n is a, c, g, t or u
  misc_difference 27..29: note = n is a, c, g, t or u
  modified_base 20: mod_base = OTHER; note = uracil
  modified_base 33..34: mod_base = OTHER; note = uracil
  modified_base 36..37: mod_base = OTHER; note = uracil
  modified_base 46..47: mod_base = OTHER; note = uracil
  source 1..53: mol_type = other DNA
tctgtacggtgacaaggcgtnnnactnnntgattgttggagcccattcagagc

SEQ ID NO: 352 - DNA, 53 bp, synthetic construct
  misc_feature 1..53: note = Synthetic Primer
  misc_difference 21..23: note = n is a, c, g, t or u
  misc_difference 27..29: note = n is a, c, g, t or u
  modified_base 20: mod_base = OTHER; note = uracil
  modified_base 33..35: mod_base = OTHER; note = uracil
  modified_base 39: mod_base = OTHER; note = uracil
  modified_base 44: mod_base = OTHER; note = uracil
  modified_base 48: mod_base = OTHER; note = uracil
  source 1..53: mol_type = other DNA
tctgtacggtgacaaggcgtnnnactnnntgatttcgctcacctggatgacaa

SEQ ID NO: 353 - DNA, 53 bp, synthetic construct
  misc_feature 1..53: note = Synthetic Primer
  misc_difference 21..23: note = n is a, c, g, t or u
  misc_difference 27..29: note = n is a, c, g, t or u
  modified_base 20: mod_base = OTHER; note = uracil
  modified_base 33: mod_base = OTHER; note = uracil
  modified_base 35: mod_base = OTHER; note = uracil
  modified_base 42: mod_base = OTHER; note = uracil
  modified_base 46: mod_base = OTHER; note = uracil
  modified_base 52: mod_base = OTHER; note = uracil
  source 1..53: mol_type = other DNA
tctgtacggtgacaaggcgtnnnactnnntgatatgaggagtacgtggaggtg

SEQ ID NO: 354 - DNA, 53 bp, synthetic construct
  misc_feature 1..53: note = Synthetic Primer
  misc_difference 21..23: note = n is a, c, g, t or u
  misc_difference 27..29: note = n is a, c, g, t or u
  modified_base 20: mod_base = OTHER; note = uracil
  modified_base 33..34: mod_base = OTHER; note = uracil
  modified_base 36: mod_base = OTHER; note = uracil
  modified_base 38: mod_base = OTHER; note = uracil
  modified_base 41..42: mod_base = OTHER; note = uracil
  modified_base 47: mod_base = OTHER; note = uracil
  modified_base 49: mod_base = OTHER; note = uracil
  modified_base 52: mod_base = OTHER; note = uracil
  source 1..53: mol_type = other DNA
tctgtacggtgacaaggcgtnnnactnnntgattctctccttggcctctcctg

SEQ ID NO: 355 - DNA, 53 bp, synthetic construct
  misc_feature 1..53: note = Synthetic Primer
  misc_difference 21..23: note = n is a, c, g, t or u
  misc_difference 27..29: note = n is a, c, g, t or u
  modified_base 20: mod_base = OTHER; note = uracil
  modified_base 33..34: mod_base = OTHER; note = uracil
  modified_base 44: mod_base = OTHER; note = uracil
  modified_base 46: mod_base = OTHER; note = uracil
  modified_base 50: mod_base = OTHER; note = uracil
  source 1..53: mol_type = other DNA
tctgtacggtgacaaggcgtnnnactnnntgattgcccaacactgtacctcag

SEQ ID NO: 356 - DNA, 53 bp, synthetic construct
  misc_feature 1..53: note = Synthetic Primer
  misc_difference 21..23: note = n is a, c, g, t or u
  misc_difference 27..29: note = n is a, c, g, t or u
  modified_base 20: mod_base = OTHER; note = uracil
  modified_base 33: mod_base = OTHER; note = uracil
  modified_base 45: mod_base = OTHER; note = uracil
  modified_base 47: mod_base = OTHER; note = uracil
  modified_base 50: mod_base = OTHER; note = uracil
  source 1..53: mol_type = other DNA
tctgtacggtgacaaggcgtnnnactnnntgatccgggcaggaatctgatgac

SEQ ID NO: 357 - DNA, 53 bp, synthetic construct
  misc_feature 1..53: note = Synthetic Primer
  misc_difference 21..23: note = n is a, c, g, t or u
  misc_difference 27..29: note = n is a, c, g, t or u
  modified_base 20: mod_base = OTHER; note = uracil
  modified_base 33: mod_base = OTHER; note = uracil
  modified_base 48: mod_base = OTHER; note = uracil
  modified_base 50..52: mod_base = OTHER; note = uracil
  source 1..53: mol_type = other DNA
tctgtacggtgacaaggcgtnnnactnnntgatgcagggcagcaacatctttg

SEQ ID NO: 358 - DNA, 53 bp, synthetic construct
  misc_feature 1..53: note = Synthetic Primer
  misc_difference 21..23: note = n is a, c, g, t or u
  misc_difference 27..29: note = n is a, c, g, t or u
  modified_base 20: mod_base = OTHER; note = uracil
  modified_base 33..35: mod_base = OTHER; note = uracil
  modified_base 37: mod_base = OTHER; note = uracil
  source 1..53: mol_type = other DNA
tctgtacggtgacaaggcgtnnnactnnntgatttctgcaacagcagcacaaa

SEQ ID NO: 359 - DNA, 53 bp, synthetic construct
  misc_feature 1..53: note = Synthetic Primer
  misc_difference 21..23: note = n is a, c, g, t or u
  misc_difference 27..29: note = n is a, c, g, t or u
  modified_base 20: mod_base = OTHER; note = uracil
  modified_base 33: mod_base = OTHER; note = uracil
  modified_base 38: mod_base = OTHER; note = uracil
  modified_base 43..44: mod_base = OTHER; note = uracil
  modified_base 47: mod_base = OTHER; note = uracil
  source 1..53: mol_type = other DNA
tctgtacggtgacaaggcgtnnnactnnntgatcagctgcaattcctcgaacg

SEQ ID NO: 360 - DNA, 53 bp, synthetic construct
  misc_feature 1..53: note = Synthetic Primer
  misc_difference 21..23: note = n is a, c, g, t or u
  misc_difference 27..29: note = n is a, c, g, t or u
  modified_base 20: mod_base = OTHER; note = uracil
  modified_base 33: mod_base = OTHER; note = uracil
  modified_base 39: mod_base = OTHER; note = uracil
  modified_base 43: mod_base = OTHER; note = uracil
  modified_base 48: mod_base = OTHER; note = uracil
  modified_base 50..51: mod_base = OTHER; note = uracil
  source 1..53: mol_type = other DNA
tctgtacggtgacaaggcgtnnnactnnntgatcggcctcactaaactgttgg

SEQ ID NO: 361 - DNA, 53 bp, synthetic construct
  misc_feature 1..53: note = Synthetic Primer
  misc_difference 21..23: note = n is a, c, g, t or u
  misc_difference 27..29: note = n is a, c, g, t or u
  modified_base 20: mod_base = OTHER; note = uracil
  modified_base 33: mod_base = OTHER; note = uracil
  modified_base 35: mod_base = OTHER; note = uracil
  modified_base 44: mod_base = OTHER; note = uracil
  source 1..53: mol_type = other DNA
tctgtacggtgacaaggcgtnnnactnnntgatgtgaaggagctggagaagca

SEQ ID NO: 362 - DNA, 53 bp, synthetic construct
  misc_feature 1..53: note = Synthetic Primer
  misc_difference 21..23: note = n is a, c, g, t or u
  misc_difference 27..29: note = n is a, c, g, t or u
  modified_base 20: mod_base = OTHER; note = uracil
  modified_base 33: mod_base = OTHER; note = uracil
  modified_base 35: mod_base = OTHER; note = uracil
  modified_base 47: mod_base = OTHER; note = uracil
  modified_base 52: mod_base = OTHER; note = uracil
  source 1..53: mol_type = other DNA
tctgtacggtgacaaggcgtnnnactnnntgatctggaggaaaaggtcgcctc

SEQ ID NO: 363 - DNA, 53 bp, synthetic construct
  misc_feature 1..53: note = Synthetic Primer
  misc_difference 21..23: note = n is a, c, g, t or u
  misc_difference 27..29: note = n is a, c, g, t or u
  modified_base 20: mod_base = OTHER; note = uracil
  modified_base 33: mod_base = OTHER; note = uracil
  modified_base 36..38: mod_base = OTHER; note = uracil
  modified_base 47: mod_base = OTHER; note = uracil
  modified_base 50: mod_base = OTHER; note = uracil
  source 1..53: mol_type = other DNA
tctgtacggtgacaaggcgtnnnactnnntgataatttagaagggctggtggc

SEQ ID NO: 364 - DNA, 53 bp, synthetic construct
  misc_feature 1..53: note = Synthetic Primer
  misc_difference 21..23: note = n is a, c, g, t or u
  misc_difference 27..29: note = n is a, c, g, t or u
  modified_base 20: mod_base = OTHER; note = uracil
  modified_base 33: mod_base = OTHER; note = uracil
  modified_base 44: mod_base = OTHER; note = uracil
  modified_base 50: mod_base = OTHER; note = uracil
  source 1..53: mol_type = other DNA
tctgtacggtgacaaggcgtnnnactnnntgatccaaaccccctacagatggc

SEQ ID NO: 365 - DNA, 53 bp, synthetic construct
  misc_feature 1..53: note = Synthetic Primer
  misc_difference 21..23: note = n is a, c, g, t or u
  misc_difference 27..29: note = n is a, c, g, t or u
  modified_base 20: mod_base = OTHER; note = uracil
  modified_base 33: mod_base = OTHER; note = uracil
  modified_base 40: mod_base = OTHER; note = uracil
  modified_base 48: mod_base = OTHER; note = uracil
  modified_base 50..51: mod_base = OTHER; note = uracil
  source 1..53: mol_type = other DNA
tctgtacggtgacaaggcgtnnnactnnntgatcaccagtgggagggtcttat

SEQ ID NO: 366 - DNA, 53 bp, synthetic construct
  misc_feature 1..53: note = Synthetic Primer
  misc_difference 21..23: note = n is a, c, g, t or u
  misc_difference 27..29: note = n is a, c, g, t or u
  modified_base 20: mod_base = OTHER; note = uracil
  modified_base 33: mod_base = OTHER; note = uracil
  modified_base 37: mod_base = OTHER; note = uracil
  modified_base 39: mod_base = OTHER; note = uracil
  source 1..53: mol_type = other DNA
tctgtacggtgacaaggcgtnnnactnnntgatacatctgcaacagcaagcac

SEQ ID NO: 367 - DNA, 53 bp, synthetic construct
  misc_feature 1..53: note = Synthetic Primer
  misc_difference 21..23: note = n is a, c, g, t or u
  misc_difference 27..29: note = n is a, c, g, t or u
  modified_base 20: mod_base = OTHER; note = uracil
  modified_base 33: mod_base = OTHER; note = uracil
  modified_base 44: mod_base = OTHER; note = uracil
  modified_base 48: mod_base = OTHER; note = uracil
  modified_base 50: mod_base = OTHER; note = uracil
  source 1..53: mol_type = other DNA
tctgtacggtgacaaggcgtnnnactnnntgatgccacagccatcaatgtcac

SEQ ID NO: 368 - DNA, 53 bp, synthetic construct
  misc_feature 1..53: note = Synthetic Primer
  misc_difference 21..23: note = n is a, c, g, t or u
  misc_difference 27..29: note = n is a, c, g, t or u
  modified_base 20: mod_base = OTHER; note = uracil
  modified_base 33: mod_base = OTHER; note = uracil
  modified_base 36: mod_base = OTHER; note = uracil
  modified_base 52: mod_base = OTHER; note = uracil
  source 1..53: mol_type = other DNA
tctgtacggtgacaaggcgtnnnactnnntgatcctgaagacaggcccaactt

SEQ ID NO: 369 - DNA, 53 bp, synthetic construct
  misc_feature 1..53: note = Synthetic Primer
  misc_difference 21..23: note = n is a, c, g, t or u
  misc_difference 27..29: note = n is a, c, g, t or u
  modified_base 20: mod_base = OTHER; note = uracil
  modified_base 33: mod_base = OTHER; note = uracil
  modified_base 41: mod_base = OTHER; note = uracil
  modified_base 52: mod_base = OTHER; note = uracil
  source 1..53: mol_type = other DNA
tctgtacggtgacaaggcgtnnnactnnntgatacgaggctgcaagagagatc

SEQ ID NO: 370 - DNA, 53 bp, synthetic construct
  misc_feature 1..53: note = Synthetic Primer
  misc_difference 21..23: note = n is a, c, g, t or u
  misc_difference 27..29: note = n is a, c, g, t or u
  modified_base 20: mod_base = OTHER; note = uracil
  modified_base 33..34: mod_base = OTHER; note = uracil
  modified_base 48..49: mod_base = OTHER; note = uracil
  modified_base 51..52: mod_base = OTHER; note = uracil
  source 1..53: mol_type = other DNA
tctgtacggtgacaaggcgtnnnactnnntgattggcacccgaggcattattt

SEQ ID NO: 371 - DNA, 53 bp, synthetic construct
  misc_feature 1..53: note = Synthetic Primer
  misc_difference 21..23: note = n is a, c, g, t or u
  misc_difference 27..29: note = n is a, c, g, t or u
  modified_base 20: mod_base = OTHER; note = uracil
  modified_base 33: mod_base = OTHER; note = uracil
  modified_base 40: mod_base = OTHER; note = uracil
  modified_base 44: mod_base = OTHER; note = uracil
  source 1..53: mol_type = other DNA
tctgtacggtgacaaggcgtnnnactnnntgatggagaatgagtacggcagca

SEQ ID NO: 372 - DNA, 53 bp, synthetic construct
  misc_feature 1..53: note = Synthetic Primer
  misc_difference 21..23: note = n is a, c, g, t or u
  misc_difference 27..29: note = n is a, c, g, t or u
  modified_base 20: mod_base = OTHER; note = uracil
  modified_base 33: mod_base = OTHER; note = uracil
  modified_base 39: mod_base = OTHER; note = uracil
  modified_base 41: mod_base = OTHER; note = uracil
  modified_base 46: mod_base = OTHER; note = uracil
  modified_base 50: mod_base = OTHER; note = uracil
  modified_base 52: mod_base = OTHER; note = uracil
  source 1..53: mol_type = other DNA
tctgtacggtgacaaggcgtnnnactnnntgatcggactctcccatcactctg

SEQ ID NO: 373 - DNA, 53 bp, synthetic construct
  misc_feature 1..53: note = Synthetic Primer
  misc_difference 21..23: note = n is a, c, g, t or u
  misc_difference 27..29: note = n is a, c, g, t or u
  modified_base 20: mod_base = OTHER; note = uracil
  modified_base 33: mod_base = OTHER; note = uracil
  modified_base 36: mod_base = OTHER; note = uracil
  modified_base 39: mod_base = OTHER; note = uracil
  source 1..53: mol_type = other DNA
tctgtacggtgacaaggcgtnnnactnnntgatgctgctgaaggaaggacaca

SEQ ID NO: 374 - DNA, 53 bp, synthetic construct
  misc_feature 1..53: note = Synthetic Primer
  misc_difference 21..23: note = n is a, c, g, t or u
  misc_difference 27..29: note = n is a, c, g, t or u
  modified_base 20: mod_base = OTHER; note = uracil
  modified_base 33: mod_base = OTHER; note = uracil
  modified_base 38: mod_base = OTHER; note = uracil
  modified_base 44: mod_base = OTHER; note = uracil
  modified_base 48: mod_base = OTHER; note = uracil
  source 1..53: mol_type = other DNA
tctgtacggtgacaaggcgtnnnactnnntgatggcatgagactcagtgcaga

SEQ ID NO: 375 - DNA, 53 bp, synthetic construct
  misc_feature 1..53: note = Synthetic Primer
  misc_difference 21..23: note = n is a, c, g, t or u
  misc_difference 27..29: note = n is a, c, g, t or u
  modified_base 20: mod_base = OTHER; note = uracil
  modified_base 33: mod_base = OTHER; note = uracil
  modified_base 39: mod_base = OTHER; note = uracil
  modified_base 41: mod_base = OTHER; note = uracil
  modified_base 44..45: mod_base = OTHER; note = uracil
  modified_base 49: mod_base = OTHER; note = uracil
  source 1..53: mol_type = other DNA
tctgtacggtgacaaggcgtnnnactnnntgatgagactctgcttcgctgcat

SEQ ID NO: 376 - DNA, 53 bp, synthetic construct
  misc_feature 1..53: note = Synthetic Primer
  misc_difference 21..23: note = n is a, c, g, t or u
  misc_difference 27..29: note = n is a, c, g, t or u
  modified_base 20: mod_base = OTHER; note = uracil
  modified_base 33: mod_base = OTHER; note = uracil
  modified_base 35: mod_base = OTHER; note = uracil
  modified_base 39: mod_base = OTHER; note = uracil
  modified_base 44: mod_base = OTHER; note = uracil
  source 1..53: mol_type = other DNA
tctgtacggtgacaaggcgtnnnactnnntgatctggatagcctccaccacct

SEQ ID NO: 377 - DNA, 53 bp, synthetic construct
  misc_feature 1..53: note = Synthetic Primer
  misc_difference 21..23: note = n is a, c, g, t or u
  misc_difference 27..29: note = n is a, c, g, t or u
  modified_base 20: mod_base = OTHER; note = uracil
  modified_base 33: mod_base = OTHER; note = uracil
  modified_base 35: mod_base = OTHER; note = uracil
  modified_base 37: mod_base = OTHER; note = uracil
  modified_base 41..42: mod_base = OTHER; note = uracil
  source 1..53: mol_type = other DNA
tctgtacggtgacaaggcgtnnnactnnntgatgtgtgaattagggaccggga

SEQ ID NO: 378 - DNA, 53 bp, synthetic construct
  misc_feature 1..53: note = Synthetic Primer
  misc_difference 21..23: note = n is a, c, g, t or u
  misc_difference 27..29: note = n is a, c, g, t or u
  modified_base 20: mod_base = OTHER; note = uracil
  modified_base 33..34: mod_base = OTHER; note = uracil
  modified_base 37: mod_base = OTHER; note = uracil
  modified_base 48..50: mod_base = OTHER; note = uracil
  source 1..53: mol_type = other DNA
tctgtacggtgacaaggcgtnnnactnnntgattcctcaaggagccctttcca

SEQ ID NO: 379 - DNA, 53 bp, synthetic construct
  misc_feature 1..53: note = Synthetic Primer
  misc_difference 21..23: note = n is a, c, g, t or u
  misc_difference 27..29: note = n is a, c, g, t or u
  modified_base 20: mod_base = OTHER; note = uracil
  modified_base 33: mod_base = OTHER; note = uracil
  modified_base 43: mod_base = OTHER; note = uracil
  modified_base 46..47: mod_base = OTHER; note = uracil
  modified_base 51: mod_base = OTHER; note = uracil
  source 1..53: mol_type = other DNA
tctgtacggtgacaaggcgtnnnactnnntgataacccccagtacttccgtca

SEQ ID NO: 380 - DNA, 53 bp, synthetic construct
  misc_feature 1..53: note = Synthetic Primer
  misc_difference 21..23: note = n is a, c, g, t or u
  misc_difference 27..29: note = n is a, c, g, t or u
  modified_base 20: mod_base = OTHER; note = uracil
  modified_base 33: mod_base = OTHER; note = uracil
  modified_base 38: mod_base = OTHER; note = uracil
  modified_base 41: mod_base = OTHER; note = uracil
  modified_base 48: mod_base = OTHER; note = uracil
  source 1..53: mol_type = other DNA
tctgtacggtgacaaggcgtnnnactnnntgatcgagtgctacaacctcagcc

SEQ ID NO: 381 - DNA, 53 bp, synthetic construct
  misc_feature 1..53: note = Synthetic Primer
  misc_difference 21..23: note = n is a, c, g, t or u
  misc_difference 27..29: note = n is a, c, g, t or u
  modified_base 20: mod_base = OTHER; note = uracil
  modified_base 33: mod_base = OTHER; note = uracil
  modified_base 36..37: mod_base = OTHER; note = uracil
  modified_base 50..52: mod_base = OTHER; note = uracil
  source 1..53: mol_type = other DNA
tctgtacggtgacaaggcgtnnnactnnntgatcattcagcccagagcctttg

SEQ ID NO: 382 - DNA, 53 bp, synthetic construct
  misc_feature 1..53: note = Synthetic Primer
  misc_difference 21..23: note = n is a, c, g, t or u
  misc_difference 27..29: note = n is a, c, g, t or u
  modified_base 20: mod_base = OTHER; note = uracil
  modified_base 33..34: mod_base = OTHER; note = uracil
  modified_base 38: mod_base = OTHER; note = uracil
  modified_base 41: mod_base = OTHER; note = uracil
  modified_base 45: mod_base = OTHER; note = uracil
  modified_base 47: mod_base = OTHER; note = uracil
  modified_base 51: mod_base = OTHER; note = uracil
  source 1..53: mol_type = other DNA
tctgtacggtgacaaggcgtnnnactnnntgattacctactccctctccgtga

SEQ ID NO: 383 - DNA, 54 bp, synthetic construct
  misc_feature 1..54: note = Synthetic Primer
  misc_difference 21..23: note = n is a, c, g, t or u
  misc_difference 27..29: note = n is a, c, g, t or u
  modified_base 20: mod_base = OTHER; note = uracil
  modified_base 33: mod_base = OTHER; note = uracil
  modified_base 38: mod_base = OTHER; note = uracil
  modified_base 41: mod_base = OTHER; note = uracil
  modified_base 43: mod_base = OTHER; note = uracil
  modified_base 45: mod_base = OTHER; note = uracil
  modified_base 47: mod_base = OTHER; note = uracil
  modified_base 49: mod_base = OTHER; note = uracil
  source 1..54: mol_type = other DNA
tctgtacggtgacaaggcgtnnnactnnntgatccactgctgtgtctgtaaacg

SEQ ID NO: 384 - DNA, 54 bp, synthetic construct
  misc_feature 1..54: note = Synthetic Primer
  misc_difference 21..23: note = n is a, c, g, t or u
  misc_difference 27..29: note = n is a, c, g, t or u
  modified_base 20: mod_base = OTHER; note = uracil
  modified_base 33: mod_base = OTHER; note = uracil
  modified_base 35: mod_base = OTHER; note = uracil
  modified_base 37: mod_base = OTHER; note = uracil
  modified_base 39: mod_base = OTHER; note = uracil
  modified_base 45..46: mod_base = OTHER; note = uracil
  modified_base 53: mod_base = OTHER; note = uracil
  source 1..54: mol_type = other DNA
tctgtacggtgacaaggcgtnnnactnnntgatctctctgcgcattcaggagtg

SEQ ID NO: 385 - DNA, 54 bp, synthetic construct
  misc_feature 1..54: note = Synthetic Primer
  misc_difference 21..23: note = n is a, c, g, t or u
  misc_difference 27..29: note = n is a, c, g, t or u
  modified_base 20: mod_base = OTHER; note = uracil
  modified_base 33: mod_base = OTHER; note = uracil
  modified_base 36: mod_base = OTHER; note = uracil
  modified_base 43: mod_base = OTHER; note = uracil
  modified_base 47: mod_base = OTHER; note = uracil
  modified_base 49: mod_base = OTHER; note = uracil
  source 1..54: mol_type = other DNA
tctgtacggtgacaaggcgtnnnactnnntgatcgtaccagatggatgtgaacc

SEQ ID NO: 386 - DNA, 54 bp, synthetic construct
  misc_feature 1..54: note = Synthetic Primer
  misc_difference 21..23: note = n is a, c, g, t or u
  misc_difference 27..29: note = n is a, c, g, t or u
  modified_base 20: mod_base = OTHER; note = uracil
  modified_base 33..34: mod_base = OTHER; note = uracil
  modified_base 41: mod_base = OTHER; note = uracil
  modified_base 46: mod_base = OTHER; note = uracil
  source 1..54: mol_type = other DNA
tctgtacggtgacaaggcgtnnnactnnntgattgggacctccggtcagaaaac

SEQ ID NO: 387 - DNA, 54 bp, synthetic construct
  misc_feature 1..54: note = Synthetic Primer
  misc_difference 21..23: note = n is a, c, g, t or u
  misc_difference 27..29: note = n is a, c, g, t or u
  modified_base 20: mod_base = OTHER; note = uracil
  modified_base 33: mod_base = OTHER; note = uracil
  modified_base 45: mod_base = OTHER; note = uracil
  modified_base 47: mod_base = OTHER; note = uracil
  modified_base 49: mod_base = OTHER; note = uracil
  modified_base 52: mod_base = OTHER; note = uracil
  source 1..54: mol_type = other DNA
tctgtacggtgacaaggcgtnnnactnnntgatccacacgcaactgtctagtgg

SEQ ID NO: 388 - DNA, 54 bp, synthetic construct
  misc_feature 1..54: note = Synthetic Primer
  misc_difference 21..23: note = n is a, c, g, t or u
  misc_difference 27..29: note = n is a, c, g, t or u
  modified_base 20: mod_base = OTHER; note = uracil
  modified_base 33: mod_base = OTHER; note = uracil
  modified_base 37: mod_base = OTHER; note = uracil
  modified_base 43..44: mod_base = OTHER; note = uracil
  source 1..54: mol_type = other DNA
tctgtacggtgacaaggcgtnnnactnnntgatccctacagattgcgagagagc

SEQ ID NO: 389 - DNA, 54 bp, synthetic construct
  misc_feature 1..54: note = Synthetic Primer
  misc_difference 21..23: note = n is a, c, g, t or u
  misc_difference 27..29: note = n is a, c, g, t or u
  modified_base 20: mod_base = OTHER; note = uracil
  modified_base 33: mod_base = OTHER; note = uracil
  modified_base 35..36: mod_base = OTHER; note = uracil
  modified_base 39: mod_base = OTHER; note = uracil
  modified_base 41: mod_base = OTHER; note = uracil
  modified_base 45: mod_base = OTHER; note = uracil
  source 1..54: mol_type = other DNA
tctgtacggtgacaaggcgtnnnactnnntgatattcctgtgcatgaaagcact

SEQ ID NO: 390 - DNA, 54 bp, synthetic construct
  misc_feature 1..54: note = Synthetic Primer
  misc_difference 21..23: note = n is a, c, g, t or u
  misc_difference 27..29: note = n is a, c, g, t or u
  modified_base 20: mod_base = OTHER; note = uracil
  modified_base 33..34: mod_base = OTHER; note = uracil
  modified_base 37: mod_base = OTHER; note = uracil
  modified_base 39: mod_base = OTHER; note = uracil
  modified_base 41: mod_base = OTHER; note = uracil
  modified_base 52..53: mod_base = OTHER; note = uracil
  source 1..54: mol_type = other DNA
tctgtacggtgacaaggcgtnnnactnnntgattcctctgtcaccaggacattc

SEQ ID NO: 391 - DNA, 54 bp, synthetic construct
  misc_feature 1..54: note = Synthetic Primer
  misc_difference 21..23: note = n is a, c, g, t or u
  misc_difference 27..29: note = n is a, c, g, t or u
  modified_base 20: mod_base = OTHER; note = uracil
  modified_base 33: mod_base = OTHER; note = uracil
  modified_base 37..38: mod_base = OTHER; note = uracil
  modified_base 53: mod_base = OTHER; note = uracil
  source 1..54: mol_type = other DNA
tctgtacggtgacaaggcgtnnnactnnntgatgacttggcagccagaaacatc

SEQ ID NO: 392 - DNA, 54 bp, synthetic construct
  misc_feature 1..54: note = Synthetic Primer
  misc_difference 21..23: note = n is a, c, g, t or u
  misc_difference 27..29: note = n is a, c, g, t or u
  modified_base 20: mod_base = OTHER; note = uracil
  modified_base 33: mod_base = OTHER; note = uracil
  modified_base 41: mod_base = OTHER; note = uracil
  modified_base 46..47: mod_base = OTHER; note = uracil
  modified_base 53: mod_base = OTHER; note = uracil
  source 1..54: mol_type = other DNA
tctgtacggtgacaaggcgtnnnactnnntgatgaccacgtgaccttgaagctc

SEQ ID NO: 393 - DNA, 54 bp, synthetic construct
  misc_feature 1..54: note = Synthetic Primer
  misc_difference 21..23: note = n is a, c, g, t or u
  misc_difference 27..29: note = n is a, c, g, t or u
  modified_base 20: mod_base = OTHER; note = uracil
  modified_base 33..34: mod_base = OTHER; note = uracil
  modified_base 37..38: mod_base = OTHER; note = uracil
  modified_base 40: mod_base = OTHER; note = uracil
  modified_base 44: mod_base = OTHER; note = uracil
  modified_base 49: mod_base = OTHER; note = uracil
  modified_base 53: mod_base = OTHER; note = uracil
  source 1..54: mol_type = other DNA
tctgtacggtgacaaggcgtnnnactnnntgattggttctggatcagctggatg

SEQ ID NO: 394 - DNA, 54 bp, synthetic construct
  misc_feature 1..54: note = Synthetic Primer
  misc_difference 21..23: note = n is a, c, g, t or u
  misc_difference 27..29: note = n is a, c, g, t or u
  modified_base 20: mod_base = OTHER; note = uracil
  modified_base 33: mod_base = OTHER; note = uracil
  modified_base 39: mod_base = OTHER; note = uracil
  modified_base 41..42: mod_base = OTHER; note = uracil
  source 1..54: mol_type = other DNA
tctgtacggtgacaaggcgtnnnactnnntgatcacactcttgagggccacaaa

SEQ ID NO: 395 - DNA, 54 bp, synthetic construct
  misc_feature 1..54: note = Synthetic Primer
  misc_difference 21..23: note = n is a, c, g, t or u
  misc_difference 27..29: note = n is a, c, g, t or u
  modified_base 20: mod_base = OTHER; note = uracil
  modified_base 33: mod_base = OTHER; note = uracil
  modified_base 36: mod_base = OTHER; note = uracil
  modified_base 39: mod_base = OTHER; note = uracil
  modified_base 46: mod_base = OTHER; note = uracil
  modified_base 48: mod_base = OTHER; note = uracil
  source 1..54: mol_type = other DNA
tctgtacggtgacaaggcgtnnnactnnntgatgctcctcaggagtctccacat

SEQ ID NO: 396 - DNA, 54 bp, synthetic construct
  misc_feature 1..54: note = Synthetic Primer
  misc_difference 21..23: note = n is a, c, g, t or u
  misc_difference 27..29: note = n is a, c, g, t or u
  modified_base 20: mod_base = OTHER; note = uracil
  modified_base 33: mod_base = OTHER; note = uracil
  modified_base 37: mod_base = OTHER; note = uracil
  modified_base 40..41: mod_base = OTHER; note = uracil
  source 1..54: mol_type = other DNA
tctgtacggtgacaaggcgtnnnactnnntgatggatacttacgcgccacagag

SEQ ID NO: 397 - DNA, 54 bp, synthetic construct
  misc_feature 1..54: note = Synthetic Primer
  misc_difference 21..23: note = n is a, c, g, t or u
  misc_difference 27..29: note = n is a, c, g, t or u
  modified_base 20: mod_base = OTHER; note = uracil
  modified_base 33: mod_base = OTHER; note = uracil
  modified_base 35..36: mod_base = OTHER; note = uracil
  modified_base 39: mod_base = OTHER; note = uracil
  source 1..54: mol_type = other DNA
tctgtacggtgacaaggcgtnnnactnnntgatcttgatgagcagcagcgaaag

SEQ ID NO: 398 - DNA, 54 bp, synthetic construct
  misc_feature 1..54: note = Synthetic Primer
  misc_difference 21..23: note = n is a, c, g, t or u
  misc_difference 27..29: note = n is a, c, g, t or u
  modified_base 20: mod_base = OTHER; note = uracil
  modified_base 33: mod_base = OTHER; note = uracil
  modified_base 35: mod_base = OTHER; note = uracil
  modified_base 43: mod_base = OTHER; note = uracil
  modified_base 50: mod_base = OTHER; note = uracil
  modified_base 53: mod_base = OTHER; note = uracil
  source 1..54: mol_type = other DNA
tctgtacggtgacaaggcgtnnnactnnntgatgtcaagccctccaacatccta

SEQ ID NO: 399 - DNA, 54 bp, synthetic construct
  misc_feature 1..54: note = Synthetic Primer
  misc_difference 21..23: note = n is a, c, g, t or u
  misc_difference 27..29: note = n is a, c, g, t or u
  modified_base 20: mod_base = OTHER; note = uracil
  modified_base 33: mod_base = OTHER; note = uracil
  modified_base 36: mod_base = OTHER; note = uracil
  modified_base 48..49: mod_base = OTHER; note = uracil
  source 1..54: mol_type = other DNA
tctgtacggtgacaaggcgtnnnactnnntgatactgacaaccacccttaaccc

SEQ ID NO: 400 - DNA, 54 bp, synthetic construct
  misc_feature 1..54: note = Synthetic Primer
  misc_difference 21..23: note = n is a, c, g, t or u
  misc_difference 27..29: note = n is a, c, g, t or u
  modified_base 20: mod_base = OTHER; note = uracil
  modified_base 33..34: mod_base = OTHER; note = uracil
  modified_base 39: mod_base = OTHER; note = uracil
  modified_base 41: mod_base = OTHER; note = uracil
  modified_base 47: mod_base = OTHER; note = uracil
  modified_base 52..53: mod_base = OTHER; note = uracil
  source 1..54: mol_type = other DNA
tctgtacggtgacaaggcgtnnnactnnntgattaccctctcagcgtacccttg

SEQ ID NO: 401 - DNA, 54 bp, synthetic construct
  misc_feature 1..54: note = Synthetic Primer
  misc_difference 21..23: note = n is a, c, g, t or u
  misc_difference 27..29: note = n is a, c, g, t or u
  modified_base 20: mod_base = OTHER; note = uracil
  modified_base 33: mod_base = OTHER; note = uracil
  modified_base 35..37: mod_base = OTHER; note = uracil
  modified_base 40: mod_base = OTHER; note = uracil
  modified_base 44: mod_base = OTHER; note = uracil
  source 1..54: mol_type = other DNA
tctgtacggtgacaaggcgtnnnactnnntgatgtttgctggctgcaagaagat

SEQ ID NO: 402 - DNA, 54 bp, synthetic construct
  misc_feature 1..54: note = Synthetic Primer
  misc_difference 21..23: note = n is a, c, g, t or u
  misc_difference 27..29: note = n is a, c, g, t or u
  modified_base 20: mod_base = OTHER; note = uracil
  modified_base 33: mod_base = OTHER; note = uracil
  modified_base 38: mod_base = OTHER; note = uracil
  modified_base 44: mod_base = OTHER; note = uracil
  modified_base 46: mod_base = OTHER; note = uracil
  modified_base 48..49: mod_base = OTHER; note = uracil
  modified_base 53: mod_base = OTHER; note = uracil
  source 1..54: mol_type = other DNA
tctgtacggtgacaaggcgtnnnactnnntgatgcactcaccatgtgttccatg

SEQ ID NO: 403 - DNA, 54 bp, synthetic construct
  misc_feature 1..54: note = Synthetic Primer
  misc_difference 21..23: note = n is a, c, g, t or u
  misc_difference 27..29: note = n is a, c, g, t or u
  modified_base 20: mod_base = OTHER; note = uracil
  modified_base 33..34: mod_base = OTHER; note = uracil
  modified_base 36: mod_base = OTHER; note = uracil
  modified_base 39: mod_base = OTHER; note = uracil
  modified_base 43: mod_base = OTHER; note = uracil
  source 1..54: mol_type = other DNA
tctgtacggtgacaaggcgtnnnactnnntgattctcgtacatgaccacaccca

SEQ ID NO: 404 - DNA, 54 bp, synthetic construct
  misc_feature 1..54: note = Synthetic Primer
  misc_difference 21..23: note = n is a, c, g, t or u
  misc_difference 27..29: note = n is a, c, g, t or u
  modified_base 20: mod_base = OTHER; note = uracil
  modified_base 33..34: mod_base = OTHER; note = uracil
  modified_base 36..37: mod_base = OTHER; note = uracil
  modified_base 40: mod_base = OTHER; note = uracil
  modified_base 44: mod_base = OTHER; note = uracil
  source 1..54: mol_type = other DNA
tctgtacggtgacaaggcgtnnnactnnntgattgttagtcactggcagcaaca

SEQ ID NO: 405 - DNA, 54 bp, synthetic construct
  misc_feature 1..54: note = Synthetic Primer
  misc_difference 21..23: note = n is a, c, g, t or u
  misc_difference 27..29: note = n is a, c, g, t or u
  modified_base 20: mod_base = OTHER; note = uracil
  modified_base 33: mod_base = OTHER; note = uracil
  modified_base 41: mod_base = OTHER; note = uracil
  modified_base 44: mod_base = OTHER; note = uracil
  modified_base 50: mod_base = OTHER; note = uracil
  source 1..54: mol_type = other DNA
tctgtacggtgacaaggcgtnnnactnnntgatgacaacgtgatgaagatcgca

SEQ ID NO: 406 - DNA, 54 bp, synthetic construct
  misc_feature 1..54: note = Synthetic Primer
  misc_difference 21..23: note = n is a, c, g, t or u
  misc_difference 27..29: note = n is a, c, g, t or u
  modified_base 20: mod_base = OTHER; note = uracil
  modified_base 33: mod_base = OTHER; note = uracil
  modified_base 36: mod_base = OTHER; note = uracil
  modified_base 38: mod_base = OTHER; note = uracil
  modified_base 42: mod_base = OTHER; note = uracil
  modified_base 44..45: mod_base = OTHER; note = uracil
  modified_base 47..48: mod_base = OTHER; note = uracil
  modified_base 50: mod_base = OTHER; note = uracil
  source 1..54: mol_type = other DNA
tctgtacggtgacaaggcgtnnnactnnntgatcctctgcctcttcttctccag

SEQ ID NO: 407 - DNA, 54 bp, synthetic construct
  misc_feature 1..54: note = Synthetic Primer
  misc_difference 21..23: note = n is a, c, g, t or u
  misc_difference 27..29: note = n is a, c, g, t or u
  modified_base 20: mod_base = OTHER; note = uracil
  modified_base 33: mod_base = OTHER; note = uracil
  modified_base 35: mod_base = OTHER; note = uracil
  modified_base 37..39: mod_base = OTHER; note = uracil
  modified_base 45: mod_base = OTHER; note = uracil
  modified_base 53: mod_base = OTHER; note = uracil
  source 1..54: mol_type = other DNA
tctgtacggtgacaaggcgtnnnactnnntgatctctttagccatggcaaggtc

SEQ ID NO: 408 - DNA, 54 bp, synthetic construct
  misc_feature 1..54: note = Synthetic Primer
  misc_difference 21..23: note = n is a, c, g, t or u
  misc_difference 27..29: note = n is a, c, g, t or u
  modified_base 20: mod_base = OTHER; note = uracil
  modified_base 33: mod_base = OTHER; note = uracil
  modified_base 35: mod_base = OTHER; note = uracil
  modified_base 44: mod_base = OTHER; note = uracil
  modified_base 46: mod_base = OTHER; note = uracil
  modified_base 48: mod_base = OTHER; note = uracil
  source 1..54: mol_type = other DNA
tctgtacggtgacaaggcgtnnnactnnntgatgtccacggagtgtatgaccac

SEQ ID NO: 409 - DNA, 54 bp, synthetic construct
  misc_feature 1..54: note = Synthetic Primer
  misc_difference 21..23: note = n is a, c, g, t or u
  misc_difference 27..29: note = n is a, c, g, t or u
  modified_base 20: mod_base = OTHER; note = uracil
  modified_base 33: mod_base = OTHER; note = uracil
  modified_base 36: mod_base = OTHER; note = uracil
  modified_base 40: mod_base = OTHER; note = uracil
  modified_base 44: mod_base = OTHER; note = uracil
  source 1..54: mol_type = other DNA
tctgtacggtgacaaggcgtnnnactnnntgatcctcagtcactgggagaagaa

SEQ ID NO: 410 - DNA, 54 bp, synthetic construct
  misc_feature 1..54: note = Synthetic Primer
  misc_difference 21..23: note = n is a, c, g, t or u
  misc_difference 27..29: note = n is a, c, g, t or u
  modified_base 20: mod_base = OTHER; note = uracil
  modified_base 33: mod_base = OTHER; note = uracil
  modified_base 35: mod_base = OTHER; note = uracil
  modified_base 41..43: mod_base = OTHER; note = uracil
  source 1..54: mol_type = other DNA
tctgtacggtgacaaggcgtnnnactnnntgatctccggctttacaccaaaagc

SEQ ID NO: 411 - DNA, 54 bp, synthetic construct
  misc_feature 1..54: note = Synthetic Primer
  misc_difference 21..23: note = n is a, c, g, t or u
  misc_difference 27..29: note = n is a, c, g, t or u
  modified_base 20: mod_base = OTHER; note = uracil
  modified_base 33: mod_base = OTHER; note = uracil
  modified_base 35..36: mod_base = OTHER; note = uracil
  modified_base 40: mod_base = OTHER; note = uracil
  modified_base 45: mod_base = OTHER; note = uracil
  modified_base 47: mod_base = OTHER; note = uracil
  modified_base 50: mod_base = OTHER; note = uracil
  source 1..54: mol_type = other DNA
tctgtacggtgacaaggcgtnnnactnnntgatcttccctgcactctcatcgct

SEQ ID NO: 412 - DNA, 54 bp, synthetic construct
  misc_feature 1..54: note = Synthetic Primer
  misc_difference 21..23: note = n is a, c, g, t or u
  misc_difference 27..29: note = n is a, c, g, t or u
  modified_base 20: mod_base = OTHER; note = uracil
  modified_base 33: mod_base = OTHER; note = uracil
  modified_base 37: mod_base = OTHER; note = uracil
  modified_base 46: mod_base = OTHER; note = uracil
  modified_base 49: mod_base = OTHER; note = uracil
  source 1..54: mol_type = other DNA
tctgtacggtgacaaggcgtnnnactnnntgatagatccaaccaatggtggaca

SEQ ID NO: 413 - DNA, 54 bp, synthetic construct
  misc_feature 1..54: note = Synthetic Primer
  misc_difference 21..23: note = n is a, c, g, t or u
  misc_difference 27..29: note = n is a, c, g, t or u
  modified_base 20: mod_base = OTHER; note = uracil
  modified_base 33..34: mod_base = OTHER; note = uracil
  modified_base 36..38: mod_base = OTHER; note = uracil
  modified_base 41: mod_base = OTHER; note = uracil
  source 1..54: mol_type = other DNA
tctgtacggtgacaaggcgtnnnactnnntgattgtttaataacccagccacgg

SEQ ID NO: 414 - DNA, 54 bp, synthetic construct
  misc_feature 1..54: note = Synthetic Primer
  misc_difference 21..23: note = n is a, c, g, t or u
  misc_difference 27..29: note = n is a, c, g, t or u
  modified_base 20: mod_base = OTHER; note = uracil
  modified_base 33: mod_base = OTHER; note = uracil
  modified_base 38: mod_base = OTHER; note = uracil
  modified_base 41: mod_base = OTHER; note = uracil
  modified_base 43: mod_base = OTHER; note = uracil
  modified_base 51: mod_base = OTHER; note = uracil
  source 1..54: mol_type = other DNA
tctgtacggtgacaaggcgtnnnactnnntgatgaagtcctctcggaaggtagc

SEQ ID NO: 415 - DNA, 54 bp, synthetic construct
  misc_feature 1..54: note = Synthetic Primer
  misc_difference 21..23: note = n is a, c, g, t or u
  misc_difference 27..29: note = n is a, c, g, t or u
  modified_base 20: mod_base = OTHER; note = uracil
  modified_base 33..34: mod_base = OTHER; note = uracil
  modified_base 46: mod_base = OTHER; note = uracil
  modified_base 53: mod_base = OTHER; note = uracil
  source 1..54: mol_type = other DNA
tctgtacggtgacaaggcgtnnnactnnntgattgaagaagcaactgagagctg

SEQ ID NO: 416 - DNA, 54 bp, synthetic construct
  misc_feature 1..54: note = Synthetic Primer
  misc_difference 21..23: note = n is a, c, g, t or u
  misc_difference 27..29: note = n is a, c, g, t or u
  modified_base 20: mod_base = OTHER; note = uracil
  modified_base 33: mod_base = OTHER; note = uracil
  modified_base 39: mod_base = OTHER; note = uracil
  modified_base 48..49: mod_base = OTHER; note = uracil
  source 1..54: mol_type = other DNA
tctgtacggtgacaaggcgtnnnactnnntgatgcagctcccagaagttgacag

SEQ ID NO: 417 - DNA, 54 bp, synthetic construct
  misc_feature 1..54: note = Synthetic Primer
  misc_difference 21..23: note = n is a, c, g, t or u
  misc_difference 27..29: note = n is a, c, g, t or u
  modified_base 20: mod_base = OTHER; note = uracil
  modified_base 33: mod_base = OTHER; note = uracil
  modified_base 35..36: mod_base = OTHER; note = uracil
  modified_base 43..44: mod_base = OTHER; note = uracil
  modified_base 47: mod_base = OTHER; note = uracil
  modified_base 50: mod_base = OTHER; note = uracil
  modified_base 52: mod_base = OTHER; note = uracil
  source 1..54: mol_type = other DNA
tctgtacggtgacaaggcgtnnnactnnntgatcttcaggcattgctactctgg

SEQ ID NO: 418 - DNA, 54 bp, synthetic construct
  misc_feature 1..54: note = Synthetic Primer
  misc_difference 21..23: note = n is a, c, g, t or u
  misc_difference 27..29: note = n is a, c, g, t or u
  modified_base 20: mod_base = OTHER; note = uracil
  modified_base 33: mod_base = OTHER; note = uracil
  modified_base 36: mod_base = OTHER; note = uracil
  modified_base 39: mod_base = OTHER; note = uracil
  modified_base 45: mod_base = OTHER; note = uracil
  modified_base 49: mod_base = OTHER; note = uracil
  source 1..54: mol_type = other DNA
tctgtacggtgacaaggcgtnnnactnnntgatcgtagtagacatcactcgcac

SEQ ID NO: 419 - DNA, 54 bp, synthetic construct
  misc_feature 1..54: note = Synthetic Primer
  misc_difference 21..23: note = n is a, c, g, t or u
  misc_difference 27..29: note = n is a, c, g, t or u
  modified_base 20: mod_base = OTHER; note = uracil
  modified_base 33: mod_base = OTHER; note = uracil
  modified_base 38: mod_base = OTHER; note = uracil
  modified_base 40: mod_base = OTHER; note = uracil
  modified_base 43: mod_base = OTHER; note = uracil
  modified_base 45..47: mod_base = OTHER; note = uracil
  modified_base 52..53: mod_base = OTHER; note = uracil
  source 1..54: mol_type = other DNA
tctgtacggtgacaaggcgtnnnactnnntgatggcatctagtctttccgcttc

SEQ ID NO: 420 - DNA, 54 bp, synthetic construct
  misc_feature 1..54: note = Synthetic Primer
  misc_difference 21..23: note = n is a, c, g, t or u
  misc_difference 27..29: note = n is a, c, g, t or u
  modified_base 20: mod_base = OTHER; note = uracil
  modified_base 33: mod_base = OTHER; note = uracil
  modified_base 35: mod_base = OTHER; note = uracil
  modified_base 37: mod_base = OTHER; note = uracil
  modified_base 45: mod_base = OTHER; note = uracil
  modified_base 52: mod_base = OTHER; note = uracil
  source 1..54: mol_type = other DNA
tctgtacggtgacaaggcgtnnnactnnntgatgtatggcacaatcagagctgt

SEQ ID NO: 421 - DNA, 54 bp, synthetic construct
  misc_feature 1..54: note = Synthetic Primer
  misc_difference 21..23: note = n is a, c, g, t or u
  misc_difference 27..29: note = n is a, c, g, t or u
  modified_base 20: mod_base = OTHER; note = uracil
  modified_base 33..34: mod_base = OTHER; note = uracil
  modified_base 40: mod_base = OTHER; note = uracil
  modified_base 43: mod_base = OTHER; note = uracil
  modified_base 45: mod_base = OTHER; note = uracil
  modified_base 50: mod_base = OTHER; note = uracil
  source 1..54: mol_type = other DNA
tctgtacggtgacaaggcgtnnnactnnntgattgaagatcatgtggcctcagt

SEQ ID NO: 422 - DNA, 54 bp, synthetic construct
  misc_feature 1..54: note = Synthetic Primer
  misc_difference 21..23: note = n is a, c, g, t or u
  misc_difference 27..29: note = n is a, c, g, t or u
  modified_base 20: mod_base = OTHER; note = uracil
  modified_base 33..35: mod_base = OTHER; note = uracil
  modified_base 38..40: mod_base = OTHER; note = uracil
  source 1..54: mol_type = other DNA
tctgtacggtgacaaggcgtnnnactnnntgatttgctttggagcagaagaagg

SEQ ID NO: 423 - DNA, 54 bp, synthetic construct
  misc_feature 1..54: note = Synthetic Primer
  misc_difference 21..23: note = n is a, c, g, t or u
  misc_difference 27..29: note = n is a, c, g, t or u
  modified_base 20: mod_base = OTHER; note = uracil
  modified_base 33: mod_base = OTHER; note = uracil
  modified_base 36..37: mod_base = OTHER; note = uracil
  modified_base 51: mod_base = OTHER; note = uracil
  source 1..54: mol_type = other DNA
tctgtacggtgacaaggcgtnnnactnnntgatagttgcaaagacacaagtggg

SEQ ID NO: 424 - DNA, 54 bp, synthetic construct
  misc_feature 1..54: note = Synthetic Primer
  misc_difference 21..23: note = n is a, c, g, t or u
  misc_difference 27..29: note = n is a, c, g, t or u
  modified_base 20: mod_base = OTHER; note = uracil
  modified_base 33..35: mod_base = OTHER; note = uracil
  modified_base 43..45: mod_base = OTHER; note = uracil
  modified_base 47..48: mod_base = OTHER; note = uracil
  modified_base 53: mod_base = OTHER; note = uracil
  source 1..54: mol_type = other DNA
tctgtacggtgacaaggcgtnnnactnnntgatttcggaacctttcttcccctg

SEQ ID NO: 425 - DNA, 54 bp, synthetic construct
  misc_feature 1..54: note = Synthetic Primer
  misc_difference 21..23: note = n is a, c, g, t or u
  misc_difference 27..29: note = n is a, c, g, t or u
  modified_base 20: mod_base = OTHER; note = uracil
  modified_base 33: mod_base = OTHER; note = uracil
  modified_base 35: mod_base = OTHER; note = uracil
  modified_base 49: mod_base = OTHER; note = uracil
  source 1..54: mol_type = other DNA
tctgtacggtgacaaggcgtnnnactnnntgatctcaacgaaaagagctaccgc

SEQ ID NO: 426 - DNA, 54 bp, synthetic construct
  misc_feature 1..54: note = Synthetic Primer
  misc_difference 21..23: note = n is a, c, g, t or u
  misc_difference 27..29: note = n is a, c, g, t or u
  modified_base 20: mod_base = OTHER; note = uracil
  modified_base 33: mod_base = OTHER; note = uracil
  modified_base 38: mod_base = OTHER; note = uracil
  modified_base 42..43: mod_base = OTHER; note = uracil
  source 1..54: mol_type = other DNA
tctgtacggtgacaaggcgtnnnactnnntgataccctgacttccagaaaacca

SEQ ID NO: 427 - DNA, 54 bp, synthetic construct
  misc_feature 1..54: note = Synthetic Primer
  misc_difference 21..23: note = n is a, c, g, t or u
  misc_difference 27..29: note = n is a, c, g, t or u
  modified_base 20: mod_base = OTHER; note = uracil
  modified_base 33: mod_base = OTHER; note = uracil
  modified_base 39: mod_base = OTHER; note = uracil
  modified_base 42: mod_base = OTHER; note = uracil
  modified_base 44: mod_base = OTHER; note = uracil
  modified_base 48: mod_base = OTHER; note = uracil
  source 1..54: mol_type = other DNA
tctgtacggtgacaaggcgtnnnactnnntgatagcactgctctcagtgagaag

SEQ ID NO: 428 - DNA, 54 bp, synthetic construct
  misc_feature 1..54: note = Synthetic Primer
  misc_difference 21..23: note = n is a, c, g, t or u
  misc_difference 27..29: note = n is a, c, g, t or u
  modified_base 20: mod_base = OTHER; note = uracil
  modified_base 33: mod_base = OTHER; note = uracil
  modified_base 37..38: mod_base = OTHER; note = uracil
  modified_base 40: mod_base = OTHER; note = uracil
  modified_base 46: mod_base = OTHER; note = uracil
  source 1..54: mol_type = other DNA
tctgtacggtgacaaggcgtnnnactnnntgatggattatgggcatcccagaag

SEQ ID NO: 429 - DNA, 54 bp, synthetic construct
  misc_feature 1..54: note = Synthetic Primer
  misc_difference 21..23: note = n is a, c, g, t or u
  misc_difference 27..29: note = n is a, c, g, t or u
  modified_base 20: mod_base = OTHER; note = uracil
  modified_base 33: mod_base = OTHER; note = uracil
  modified_base 39: mod_base = OTHER; note = uracil
  modified_base 41..42: mod_base = OTHER; note = uracil
  modified_base 49..50: mod_base = OTHER; note = uracil
  modified_base 53: mod_base = OTHER; note = uracil
  source 1..54: mol_type = other DNA
tctgtacggtgacaaggcgtnnnactnnntgatgcaaatattgggcccttcctg

SEQ ID NO: 430 - DNA, 54 bp, synthetic construct
  misc_feature 1..54: note = Synthetic Primer
  misc_difference 21..23: note = n is a, c, g, t or u
  misc_difference 27..29: note = n is a, c, g, t or u
  modified_base 20: mod_base = OTHER; note = uracil
  modified_base 33: mod_base = OTHER; note = uracil
  modified_base 37: mod_base = OTHER; note = uracil
  modified_base 43: mod_base = OTHER; note = uracil
  modified_base 45: mod_base = OTHER; note = uracil
  source 1..54: mol_type = other DNA
tctgtacggtgacaaggcgtnnnactnnntgataactgaagctgtcaggacaga

SEQ ID NO: 431 - DNA, 54 bp, synthetic construct
  misc_feature 1..54: note = Synthetic Primer
  misc_difference 21..23: note = n is a, c, g, t or u
  misc_difference 27..29: note = n is a, c, g, t or u
  modified_base 20: mod_base = OTHER; note = uracil
  modified_base 33..34: mod_base = OTHER; note = uracil
  modified_base 36..37: mod_base = OTHER; note = uracil
  modified_base 41: mod_base = OTHER; note = uracil
  modified_base 45..46: mod_base = OTHER; note = uracil
  modified_base 53: mod_base = OTHER; note = uracil
  source 1..54: mol_type = other DNA
tctgtacggtgacaaggcgtnnnactnnntgattgttggctaccttgggacatc

SEQ ID NO: 432 - DNA, 54 bp, synthetic construct
  misc_feature 1..54: note = Synthetic Primer
  misc_difference 21..23: note = n is a, c, g, t or u
  misc_difference 27..29: note = n is a, c, g, t or u
  modified_base 20: mod_base = OTHER; note = uracil
  modified_base 33: mod_base = OTHER; note = uracil
  modified_base 35: mod_base = OTHER; note = uracil
  modified_base 39: mod_base = OTHER; note = uracil
  modified_base 41: mod_base = OTHER; note = uracil
  modified_base 43..44: mod_base = OTHER; note = uracil
  modified_base 46: mod_base = OTHER; note = uracil
  modified_base 53: mod_base = OTHER; note = uracil
  source 1..54: mol_type = other DNA
tctgtacggtgacaaggcgtnnnactnnntgatatgcatctcttgtcgcaggtt

SEQ ID NO: 433 - DNA, 54 bp, synthetic construct
  misc_feature 1..54: note = Synthetic Primer
  misc_difference 21..23: note = n is a, c, g, t or u
  misc_difference 27..29: note = n is a, c, g, t or u
  modified_base 20: mod_base = OTHER; note = uracil
  modified_base 33: mod_base = OTHER; note = uracil
  modified_base 38: mod_base = OTHER; note = uracil
  modified_base 40: mod_base = OTHER; note = uracil
  modified_base 46: mod_base = OTHER; note = uracil
  modified_base 48: mod_base = OTHER; note = uracil
  modified_base 52: mod_base = OTHER; note = uracil
  source 1..54: mol_type = other DNA
tctgtacggtgacaaggcgtnnnactnnntgatgaactgtgaggatgtggctga

SEQ ID NO: 434 - DNA, 54 bp, synthetic construct
  misc_feature 1..54: note = Synthetic Primer
  misc_difference 21..23: note = n is a, c, g, t or u
  misc_difference 27..29: note = n is a, c, g, t or u
  modified_base 20: mod_base = OTHER; note = uracil
  modified_base 33: mod_base = OTHER; note = uracil
  modified_base 36: mod_base = OTHER; note = uracil
  modified_base 39: mod_base = OTHER; note = uracil
  source 1..54: mol_type = other DNA
tctgtacggtgacaaggcgtnnnactnnntgatagtaatcaagcagcagccaga

SEQ ID NO: 435 - DNA, 54 bp, synthetic construct
  misc_feature 1..54: note = Synthetic Primer
  misc_difference 21..23: note = n is a, c, g, t or u
  misc_difference 27..29: note = n is a, c, g, t or u
  modified_base 20: mod_base = OTHER; note = uracil
  modified_base 33..34: mod_base = OTHER; note = uracil
  modified_base 36..37: mod_base = OTHER; note = uracil
  modified_base 43: mod_base = OTHER; note = uracil
  modified_base 46: mod_base = OTHER; note = uracil
  modified_base 48: mod_base = OTHER; note = uracil
  modified_base 53: mod_base = OTHER; note = uracil
  source 1..54: mol_type = other DNA
tctgtacggtgacaaggcgtnnnactnnntgattattgggactcctctgccctg

SEQ ID NO: 436 - DNA, 54 bp, synthetic construct
  misc_feature 1..54: note = Synthetic Primer
  misc_difference 21..23: note = n is a, c, g, t or u
  misc_difference 27..29: note = n is a, c, g, t or u
  modified_base 20: mod_base = OTHER; note = uracil
  modified_base 33: mod_base = OTHER; note = uracil
  modified_base 40: mod_base = OTHER; note = uracil
  modified_base 43..46: mod_base = OTHER; note = uracil
  modified_base 51: mod_base = OTHER; note = uracil
  source 1..54: mol_type = other DNA
tctgtacggtgacaaggcgtnnnactnnntgatccaagctggttttgaagtcgc

SEQ ID NO: 437 - DNA, 54 bp, synthetic construct
  misc_feature 1..54: note = Synthetic Primer
  misc_difference 21..23: note = n is a, c, g, t or u
  misc_difference 27..29: note = n is a, c, g, t or u
  modified_base 20: mod_base = OTHER; note = uracil
  modified_base 33: mod_base = OTHER; note = uracil
  modified_base 35: mod_base = OTHER; note = uracil
  modified_base 49..51: mod_base = OTHER; note = uracil
  modified_base 53: mod_base = OTHER; note = uracil
  source 1..54: mol_type = other DNA
tctgtacggtgacaaggcgtnnnactnnntgatgtcagagagagcagctttgtg

SEQ ID NO: 438 - DNA, 54 bp, synthetic construct
  misc_feature 1..54: note = Synthetic Primer
  misc_difference 21..23: note = n is a, c, g, t or u
  misc_difference 27..29: note = n is a, c, g, t or u
  modified_base 20: mod_base = OTHER; note = uracil
  modified_base 33: mod_base = OTHER; note = uracil
  modified_base 37..38: mod_base = OTHER; note = uracil
  modified_base 43: mod_base = OTHER; note = uracil
  modified_base 46: mod_base = OTHER; note = uracil
  modified_base 48: mod_base = OTHER; note = uracil
  modified_base 50: mod_base = OTHER; note = uracil
  modified_base 52..53: mod_base = OTHER; note = uracil
  source 1..54: mol_type = other DNA
tctgtacggtgacaaggcgtnnnactnnntgatgcattcagctcctctgtgttt

SEQ ID NO: 439 - DNA, 54 bp, synthetic construct
  misc_feature 1..54: note = Synthetic Primer
  misc_difference 21..23: note = n is a, c, g, t or u
  misc_difference 27..29: note = n is a, c, g, t or u
  modified_base 20: mod_base = OTHER; note = uracil
  modified_base 33..34: mod_base = OTHER; note = uracil
  modified_base 36..37: mod_base = OTHER; note = uracil
  modified_base 45..46: mod_base = OTHER; note = uracil
  modified_base 50: mod_base = OTHER; note = uracil
  modified_base 53: mod_base = OTHER; note = uracil
  source 1..54: mol_type = other DNA
tctgtacggtgacaaggcgtnnnactnnntgattgttgaagagattggctggtc

SEQ ID NO: 440 - DNA, 54 bp, synthetic construct
  misc_feature 1..54: note = Synthetic Primer
  misc_difference 21..23: note = n is a, c, g, t or u
  misc_difference 27..29: note = n is a, c, g, t or u
  modified_base 20: mod_base = OTHER; note = uracil
  modified_base 33..34: mod_base = OTHER; note = uracil
  modified_base 40: mod_base = OTHER; note = uracil
  modified_base 43: mod_base = OTHER; note = uracil
  modified_base 48: mod_base = OTHER; note = uracil
  source 1..54: mol_type = other DNA
tctgtacggtgacaaggcgtnnnactnnntgattacaactgctaccatgagggc

SEQ ID NO: 441 - DNA, 54 bp, synthetic construct
  misc_feature 1..54: note = Synthetic Primer
  misc_difference 21..23: note = n is a, c, g, t or u
  misc_difference 27..29: note = n is a, c, g, t or u
  modified_base 20: mod_base = OTHER; note = uracil
  modified_base 33: mod_base = OTHER; note = uracil
  modified_base 35: mod_base = OTHER; note = uracil
  modified_base 37: mod_base = OTHER; note = uracil
  modified_base 45: mod_base = OTHER; note = uracil
  modified_base 52: mod_base = OTHER; note = uracil
  source 1..54: mol_type = other DNA
tctgtacggtgacaaggcgtnnnactnnntgatgtgtgggaacgtgaaacatct

SEQ ID NO: 442 - DNA, 54 bp, synthetic construct
  misc_feature 1..54: note = Synthetic Primer
  misc_difference 21..23: note = n is a, c, g, t or u
  misc_difference 27..29: note = n is a, c, g, t or u
  modified_base 20: mod_base = OTHER; note = uracil
  modified_base 33: mod_base = OTHER; note = uracil
  modified_base 36: mod_base = OTHER; note = uracil
  modified_base 41: mod_base = OTHER; note = uracil
  modified_base 43..44: mod_base = OTHER; note = uracil
  modified_base 49: mod_base = OTHER; note = uracil
  modified_base 53: mod_base = OTHER; note = uracil
  source 1..54: mol_type = other DNA
tctgtacggtgacaaggcgtnnnactnnntgatgctcacatcttcaggtgcctc

SEQ ID NO: 443 - DNA, 54 bp, synthetic construct
  misc_feature 1..54: note = Synthetic Primer
  misc_difference 21..23: note = n is a, c, g, t or u
  misc_difference 27..29: note = n is a, c, g, t or u
  modified_base 20: mod_base = OTHER; note = uracil
  modified_base 33: mod_base = OTHER; note = uracil
  modified_base 37: mod_base = OTHER; note = uracil
  modified_base 39: mod_base = OTHER; note = uracil
  source 1..54: mol_type = other DNA
tctgtacggtgacaaggcgtnnnactnnntgatccatctacaagaaagccccca

SEQ ID NO: 444 - DNA, 54 bp, synthetic construct
  misc_feature 1..54: note = Synthetic Primer
  misc_difference 21..23: note = n is a, c, g, t or u
  misc_difference 27..29: note = n is a, c, g, t or u
  modified_base 20: mod_base = OTHER; note = uracil
  modified_base 33: mod_base = OTHER; note = uracil
  modified_base 39: mod_base = OTHER; note = uracil
  modified_base 46..47: mod_base = OTHER; note = uracil
  modified_base 49: mod_base = OTHER; note = uracil
  source 1..54: mol_type = other DNA
tctgtacggtgacaaggcgtnnnactnnntgatccaggtaccaccttatccaca

SEQ ID NO: 445 - DNA, 54 bp, synthetic construct
  misc_feature 1..54: note = Synthetic Primer
  misc_difference 21..23: note = n is a, c, g, t or u
  misc_difference 27..29: note = n is a, c, g, t or u
  modified_base 20: mod_base = OTHER; note = uracil
  modified_base 33..34: mod_base = OTHER; note = uracil
  modified_base 38: mod_base = OTHER; note = uracil
  modified_base 50: mod_base = OTHER; note = uracil
  source 1..54: mol_type = other DNA
tctgtacggtgacaaggcgtnnnactnnntgattacctggacaagcacatggag

SEQ ID NO: 446 - DNA, 54 bp, synthetic construct
  misc_feature 1..54: note = Synthetic Primer
  misc_difference 21..23: note = n is a, c, g, t or u
  misc_difference 27..29: note = n is a, c, g, t or u
  modified_base 20: mod_base = OTHER; note = uracil
  modified_base 33: mod_base = OTHER; note = uracil
  modified_base 38: mod_base = OTHER; note = uracil
  modified_base 40: mod_base = OTHER; note = uracil
  modified_base 42..43: mod_base = OTHER; note = uracil
  modified_base 48: mod_base = OTHER; note = uracil
  modified_base 53: mod_base = OTHER; note = uracil
  source 1..54: mol_type = other DNA
tctgtacggtgacaaggcgtnnnactnnntgatacagtctcttgcaatcggcta

SEQ ID NO: 447 - DNA, 54 bp, synthetic construct
  misc_feature 1..54: note = Synthetic Primer
  misc_difference 21..23: note = n is a, c, g, t or u
  misc_difference 27..29: note = n is a, c, g, t or u
  modified_base 20: mod_base = OTHER; note = uracil
  modified_base 33: mod_base = OTHER; note = uracil
  modified_base 43..45: mod_base = OTHER; note = uracil
  modified_base 47..48: mod_base = OTHER; note = uracil
  source 1..54: mol_type = other DNA
tctgtacggtgacaaggcgtnnnactnnntgatgcccgggaatttcttcgaaaa

SEQ ID NO: 448 - DNA, 54 bp, synthetic construct
  misc_feature 1..54: note = Synthetic Primer
  misc_difference 21..23: note = n is a, c, g, t or u
  misc_difference 27..29: note = n is a, c, g, t or u
  modified_base 20: mod_base = OTHER; note = uracil
  modified_base 33: mod_base = OTHER; note = uracil
  modified_base 37..38: mod_base = OTHER; note = uracil
  modified_base 42: mod_base = OTHER; note = uracil
  modified_base 48: mod_base = OTHER; note = uracil
  source 1..54: mol_type = other DNA
tctgtacggtgacaaggcgtnnnactnnntgataacttcagtgggcatcgagat

SEQ ID NO: 449 - DNA, 54 bp, synthetic construct
  misc_feature 1..54: note = Synthetic Primer
  misc_difference 21..23: note = n is a, c, g, t or u
  misc_difference 27..29: note = n is a, c, g, t or u
  modified_base 20: mod_base = OTHER; note = uracil
  modified_base 33..34: mod_base = OTHER; note = uracil
  modified_base 42: mod_base = OTHER; note = uracil
  modified_base 44..46: mod_base = OTHER; note = uracil
  modified_base 51: mod_base = OTHER; note = uracil
  source 1..54: mol_type = other DNA
tctgtacggtgacaaggcgtnnnactnnntgattcacagactgtttccactcct

SEQ ID NO: 450 - DNA, 54 bp, synthetic construct
  misc_feature 1..54: note = Synthetic Primer
  misc_difference 21..23: note = n is a, c, g, t or u
  misc_difference 27..29: note = n is a, c, g, t or u
  modified_base 20: mod_base = OTHER; note = uracil
  modified_base 33: mod_base = OTHER; note = uracil
  modified_base 36: mod_base = OTHER; note = uracil
  modified_base 43: mod_base = OTHER; note = uracil
  source 1..54: mol_type = other DNA
tctgtacggtgacaaggcgtnnnactnnntgatagtagaggatgccgaggagaa

SEQ ID NO: 451 - DNA, 54 bp, synthetic construct
  misc_feature 1..54: note = Synthetic Primer
  misc_difference 21..23: note = n is a, c, g, t or u
  misc_difference 27..29: note = n is a, c, g, t or u
  modified_base 20: mod_base = OTHER; note = uracil
  modified_base 33: mod_base = OTHER; note = uracil
  modified_base 35: mod_base = OTHER; note = uracil
  modified_base 38: mod_base = OTHER; note = uracil
  modified_base 40: mod_base = OTHER; note = uracil
  modified_base 43: mod_base = OTHER; note = uracil
  modified_base 49: mod_base = OTHER; note = uracil
  source 1..54: mol_type = other DNA
tctgtacggtgacaaggcgtnnnactnnntgatctcctgtgatcgcactgacac

SEQ ID NO: 452 - DNA, 54 bp, synthetic construct
  misc_feature 1..54: note = Synthetic Primer
  misc_difference 21..23: note = n is a, c, g, t or u
  misc_difference 27..29: note = n is a, c, g, t or u
  modified_base 20: mod_base = OTHER; note = uracil
  modified_base 33: mod_base = OTHER; note = uracil
  modified_base 35: mod_base = OTHER; note = uracil
  modified_base 39: mod_base = OTHER; note = uracil
  modified_base 42..43: mod_base = OTHER; note = uracil
  modified_base 53: mod_base = OTHER; note = uracil
  source 1..54: mol_type = other DNA
tctgtacggtgacaaggcgtnnnactnnntgatgtgcatccttggcagaaagtg

SEQ ID NO: 453 - DNA, 54 bp, synthetic construct
  misc_feature 1..54: note = Synthetic Primer
  misc_difference 21..23: note = n is a, c, g, t or u
  misc_difference 27..29: note = n is a, c, g, t or u
  modified_base 20: mod_base = OTHER; note = uracil
  modified_base 33: mod_base = OTHER; note = uracil
  modified_base 42: mod_base = OTHER; note = uracil
  modified_base 44..45: mod_base = OTHER; note = uracil
  source 1..54: mol_type = other DNA
tctgtacggtgacaaggcgtnnnactnnntgatcaacaacctgttggagcacat

SEQ ID NO: 454 - DNA, 54 bp, synthetic construct
  misc_feature 1..54: note = Synthetic Primer
  misc_difference 21..23: note = n is a, c, g, t or u
  misc_difference 27..29: note = n is a, c, g, t or u
  modified_base 20: mod_base = OTHER; note = uracil
  modified_base 33: mod_base = OTHER; note = uracil
  modified_base 39: mod_base = OTHER; note = uracil
  modified_base 47: mod_base = OTHER; note = uracil
  modified_base 53: mod_base = OTHER; note = uracil
  source 1..54: mol_type = other DNA
tctgtacggtgacaaggcgtnnnactnnntgataccagtgcaagactgagactc

SEQ ID NO: 455 - DNA, 54 bp, synthetic construct
  misc_feature 1..54: note = Synthetic Primer
  misc_difference 21..23: note = n is a, c, g, t or u
  misc_difference 27..29: note = n is a, c, g, t or u
  modified_base 20: mod_base = OTHER; note = uracil
  modified_base 33..34: mod_base = OTHER; note = uracil
  modified_base 37: mod_base = OTHER; note = uracil
  modified_base 41: mod_base = OTHER; note = uracil
  modified_base 45: mod_base = OTHER; note = uracil
  modified_base 50: mod_base = OTHER; note = uracil
  source 1..54: mol_type = other DNA
tctgtacggtgacaaggcgtnnnactnnntgattcctccatcagtgacctgaag

SEQ ID NO: 456 - DNA, 54 bp, synthetic construct
  misc_feature 1..54: note = Synthetic Primer
  misc_difference 21..23: note = n is a, c, g, t or u
  misc_difference 27..29: note = n is a, c, g, t or u
  modified_base 20: mod_base = OTHER; note = uracil
  modified_base 33: mod_base = OTHER; note = uracil
  modified_base 42..43: mod_base = OTHER; note = uracil
  modified_base 46: mod_base = OTHER; note = uracil
  source 1..54: mol_type = other DNA
tctgtacggtgacaaggcgtnnnactnnntgatcagaggccttcatggaaggaa

SEQ ID NO: 457 - DNA, 54 bp, synthetic construct
  misc_feature 1..54: note = Synthetic Primer
  misc_difference 21..23: note = n is a, c, g, t or u
  misc_difference 27..29: note = n is a, c, g, t or u
  modified_base 20: mod_base = OTHER; note = uracil
  modified_base 33: mod_base = OTHER; note = uracil
  modified_base 35: mod_base = OTHER; note = uracil
  modified_base 39..40: mod_base = OTHER; note = uracil
  modified_base 51: mod_base = OTHER; note = uracil
  modified_base 53: mod_base = OTHER; note = uracil
  source 1..54: mol_type = other DNA
tctgtacggtgacaaggcgtnnnactnnntgatgtgacttccaccaggactgtg

SEQ ID NO: 458 - DNA, 54 bp, synthetic construct
  misc_feature 1..54: note = Synthetic Primer
  misc_difference 21..23: note = n is a, c, g, t or u
  misc_difference 27..29: note = n is a, c, g, t or u
  modified_base 20: mod_base = OTHER; note = uracil
  modified_base 33: mod_base = OTHER; note = uracil
  modified_base 35: mod_base = OTHER; note = uracil
  modified_base 42: mod_base = OTHER; note = uracil
  modified_base 45: mod_base = OTHER; note = uracil
  modified_base 49..51: mod_base = OTHER; note = uracil
  source 1..54: mol_type = other DNA
tctgtacggtgacaaggcgtnnnactnnntgatgtgaccagtgctacgtttcct

SEQ ID NO: 459 - DNA, 54 bp, synthetic construct
  misc_feature 1..54: note = Synthetic Primer
  misc_difference 21..23: note = n is a, c, g, t or u
  misc_difference 27..29: note = n is a, c, g, t or u
  modified_base 20: mod_base = OTHER; note = uracil
  modified_base 33: mod_base = OTHER; note = uracil
  modified_base 40: mod_base = OTHER; note = uracil
  modified_base 50..53: mod_base = OTHER; note = uracil
  source 1..54: mol_type = other DNA
tctgtacggtgacaaggcgtnnnactnnntgatgccacatggcggagagtttta

SEQ ID NO: 460 - DNA, 54 bp, synthetic construct
  misc_feature 1..54: note = Synthetic Primer
  misc_difference 21..23: note = n is a, c, g, t or u
  misc_difference 27..29: note = n is a, c, g, t or u
  modified_base 20: mod_base = OTHER; note = uracil
  modified_base 33..34: mod_base = OTHER; note = uracil
  modified_base 37: mod_base = OTHER; note = uracil
  modified_base 39: mod_base = OTHER; note = uracil
  modified_base 45..46: mod_base = OTHER; note = uracil
  modified_base 50: mod_base = OTHER; note = uracil
  modified_base 52: mod_base = OTHER; note = uracil
  source 1..54: mol_type = other DNA
tctgtacggtgacaaggcgtnnnactnnntgattactgtgccacttcagtgtgc

SEQ ID NO: 461 - DNA, 54 bp, synthetic construct
  misc_feature 1..54: note = Synthetic Primer
  misc_difference 21..23: note = n is a, c, g, t or u
  misc_difference 27..29: note = n is a, c, g, t or u
  modified_base 20: mod_base = OTHER; note = uracil
  modified_base 33: mod_base = OTHER; note = uracil
  modified_base 36..37: mod_base = OTHER; note = uracil
  modified_base 41: mod_base = OTHER; note = uracil
  modified_base 46: mod_base = OTHER; note = uracil
  modified_base 49: mod_base = OTHER; note = uracil
  modified_base 52: mod_base = OTHER; note = uracil
  source 1..54: mol_type = other DNA
tctgtacggtgacaaggcgtnnnactnnntgatagttcagtgccatcatcctgg

SEQ ID NO: 462 - DNA, 54 bp, synthetic construct
  misc_feature 1..54: note = Synthetic Primer
  misc_difference 21..23: note = n is a, c, g, t or u
  misc_difference 27..29: note = n is a, c, g, t or u
  modified_base 20: mod_base = OTHER; note = uracil
  modified_base 33: mod_base = OTHER; note = uracil
  modified_base 35: mod_base = OTHER; note = uracil
  modified_base 39..40: mod_base = OTHER; note = uracil
  modified_base 50: mod_base = OTHER; note = uracil
  source 1..54: mol_type = other DNA
tctgtacggtgacaaggcgtnnnactnnntgatatcccttccacagacgtcact

SEQ ID NO: 463 - DNA, 54 bp, synthetic construct
  misc_feature 1..54: note = Synthetic Primer
  misc_difference 21..23: note = n is a, c, g, t or u
  misc_difference 27..29: note = n is a, c, g, t or u
  modified_base 20: mod_base = OTHER; note = uracil
  modified_base 33..34: mod_base = OTHER; note = uracil
  modified_base 45: mod_base = OTHER; note = uracil
  modified_base 52: mod_base = OTHER; note = uracil
  source 1..54: mol_type = other DNA
tctgtacggtgacaaggcgtnnnactnnntgattaaccggagcctggaccatag

SEQ ID NO: 464 - DNA, 54 bp, synthetic construct
  misc_feature 1..54: note = Synthetic Primer
  misc_difference 21..23: note = n is a, c, g, t or u
  misc_difference 27..29: note = n is a, c, g, t or u
  modified_base 20: mod_base = OTHER; note = uracil
  modified_base 33: mod_base = OTHER; note = uracil
  modified_base 39: mod_base = OTHER; note = uracil
  modified_base 41: mod_base = OTHER; note = uracil
  modified_base 46: mod_base = OTHER; note = uracil
  modified_base 48: mod_base = OTHER; note = uracil
  modified_base 50: mod_base = OTHER; note = uracil
  modified_base 52: mod_base = OTHER; note = uracil
  source 1..54: mol_type = other DNA
tctgtacggtgacaaggcgtnnnactnnntgataacgctctggagtctctctcc

SEQ ID NO: 465 - DNA, 55 bp, synthetic construct
  misc_feature 1..55: note = Synthetic Primer
  misc_difference 21..23: note = n is a, c, g, t or u
  misc_difference 27..29: note = n is a, c, g, t or u
  modified_base 20: mod_base = OTHER; note = uracil
  modified_base 33: mod_base = OTHER; note = uracil
  modified_base 35: mod_base = OTHER; note = uracil
  modified_base 44: mod_base = OTHER; note = uracil
  modified_base 48: mod_base = OTHER; note = uracil
  source 1..55: mol_type = other DNA
tctgtacggtgacaaggcgtnnnactnnntgatgtagagcaaatccatccccaca

SEQ ID NO: 466 - DNA, 55 bp, synthetic construct
  misc_feature 1..55: note = Synthetic Primer
  misc_difference 21..23: note = n is a, c, g, t or u
  misc_difference 27..29: note = n is a, c, g, t or u
  modified_base 20: mod_base = OTHER; note = uracil
  modified_base 33..34: mod_base = OTHER; note = uracil
  modified_base 46..48: mod_base = OTHER; note = uracil
  modified_base 51: mod_base = OTHER; note = uracil
  source 1..55: mol_type = other DNA
tctgtacggtgacaaggcgtnnnactnnntgattcgagccaccaatttcataggc

SEQ ID NO: 467 - DNA, 55 bp, synthetic construct
  misc_feature 1..55: note = Synthetic Primer
  misc_difference 21..23: note = n is a, c, g, t or u
  misc_difference 27..29: note = n is a, c, g, t or u
  modified_base 20: mod_base = OTHER; note = uracil
  modified_base 33: mod_base = OTHER; note = uracil
  modified_base 35: mod_base = OTHER; note = uracil
  modified_base 47: mod_base = OTHER; note = uracil
  modified_base 49: mod_base = OTHER; note = uracil
  modified_base 51..52: mod_base = OTHER; note = uracil
  source 1..55: mol_type = other DNA
tctgtacggtgacaaggcgtnnnactnnntgatctcccaaccaagctctcttgag

SEQ ID NO: 468 - DNA, 55 bp, synthetic construct
  misc_feature 1..55: note = Synthetic Primer
  misc_difference 21..23: note = n is a, c, g, t or u
  misc_difference 27..29: note = n is a, c, g, t or u
  modified_base 20: mod_base = OTHER; note = uracil
  modified_base 33: mod_base = OTHER; note = uracil
  modified_base 35: mod_base = OTHER; note = uracil
  modified_base 42: mod_base = OTHER; note = uracil
  modified_base 47: mod_base = OTHER; note = uracil
  modified_base 50: mod_base = OTHER; note = uracil
  source 1..55: mol_type = other DNA
tctgtacggtgacaaggcgtnnnactnnntgatgtccccaatgacctgctgaaat

SEQ ID NO: 469 - DNA, 55 bp, synthetic construct
  misc_feature 1..55: note = Synthetic Primer
  misc_difference 21..23: note = n is a, c, g, t or u
  misc_difference 27..29: note = n is a, c, g, t or u
  modified_base 20: mod_base = OTHER; note = uracil
  modified_base 33: mod_base = OTHER; note = uracil
  modified_base 42: mod_base = OTHER; note = uracil
  modified_base 44: mod_base = OTHER; note = uracil
  modified_base 53: mod_base = OTHER; note = uracil
  source 1..55: mol_type = other DNA
tctgtacggtgacaaggcgtnnnactnnntgatcagaagcatctcaccgaaatcc

SEQ ID NO: 470 - DNA, 55 bp, synthetic construct
  misc_feature 1..55: note = Synthetic Primer
  misc_difference 21..23: note = n is a, c, g, t or u
  misc_difference 27..29: note = n is a, c, g, t or u
  modified_base 20: mod_base = OTHER; note = uracil
  modified_base 33: mod_base = OTHER; note = uracil
  modified_base 35..36: mod_base = OTHER; note = uracil
  modified_base 38: mod_base = OTHER; note = uracil
  modified_base 45: mod_base = OTHER; note = uracil
  modified_base 54: mod_base = OTHER; note = uracil
  source 1..55: mol_type = other DNA
tctgtacggtgacaaggcgtnnnactnnntgatcttctaccagctcaccaagctc

SEQ ID NO: 471 - DNA, 55 bp, synthetic construct
  misc_feature 1..55: note = Synthetic Primer
  misc_difference 21..23: note = n is a, c, g, t or u
  misc_difference 27..29: note = n is a, c, g, t or u
  modified_base 20: mod_base = OTHER; note = uracil
  modified_base 33: mod_base = OTHER; note = uracil
  modified_base 43: mod_base = OTHER; note = uracil
  modified_base 49: mod_base = OTHER; note = uracil
  modified_base 51: mod_base = OTHER; note = uracil
  modified_base 53..54: mod_base = OTHER; note = uracil
  source 1..55: mol_type = other DNA
tctgtacggtgacaaggcgtnnnactnnntgatcacccccactgaacctctctta

SEQ ID NO: 472 - DNA, 55 bp, synthetic construct
  misc_feature 1..55: note = Synthetic Primer
  misc_difference 21..23: note = n is a, c, g, t or u
  misc_difference 27..29: note = n is a, c, g, t or u
  modified_base 20: mod_base = OTHER; note = uracil
  modified_base 33: mod_base = OTHER; note = uracil
  modified_base 38: mod_base = OTHER; note = uracil
  modified_base 51: mod_base = OTHER; note = uracil
  modified_base 53: mod_base = OTHER; note = uracil
  source 1..55: mol_type = other DNA
tctgtacggtgacaaggcgtnnnactnnntgatccaatccccacaccaagtatca

SEQ ID NO: 473 - DNA, 55 bp, synthetic construct
  misc_feature 1..55: note = Synthetic Primer
  misc_difference 21..23: note = n is a, c, g, t or u
  misc_difference 27..29: note = n is a, c, g, t or u
  modified_base 20: mod_base = OTHER; note = uracil
  modified_base 33: mod_base = OTHER; note = uracil
  modified_base 39: mod_base = OTHER; note = uracil
  modified_base 51: mod_base = OTHER; note = uracil
  modified_base 54: mod_base = OTHER; note = uracil
  source 1..55: mol_type = other DNA
tctgtacggtgacaaggcgtnnnactnnntgatcgcaatccggaaccagatcata

SEQ ID NO: 474 - DNA, 55 bp, synthetic construct
  misc_feature 1..55: note = Synthetic Primer
  misc_difference 21..23: note = n is a, c, g, t or u
  misc_difference 27..29: note = n is a, c, g, t or u
  modified_base 20: mod_base = OTHER; note = uracil
  modified_base 33: mod_base = OTHER; note = uracil
  modified_base 38: mod_base = OTHER; note = uracil
  modified_base 44: mod_base = OTHER; note = uracil
  modified_base 49: mod_base = OTHER; note = uracil
  modified_base 51..54: mod_base = OTHER; note = uracil
  source 1..55: mol_type = other DNA
tctgtacggtgacaaggcgtnnnactnnntgatggactaggcgtgggatgttttt

SEQ ID NO: 475 - DNA, 55 bp, synthetic construct
  misc_feature 1..55: note = Synthetic Primer
  misc_difference 21..23: note = n is a, c, g, t or u
  misc_difference 27..29: note = n is a, c, g, t or u
  modified_base 20: mod_base = OTHER; note = uracil
  modified_base 33: mod_base = OTHER; note = uracil
  modified_base 36: mod_base = OTHER; note = uracil
  modified_base 48..50: mod_base = OTHER; note = uracil
  modified_base 53..54: mod_base = OTHER; note = uracil
  source 1..55: mol_type = other DNA
tctgtacggtgacaaggcgtnnnactnnntgatactccacacgcaaatttccttc

SEQ ID NO: 476 - DNA, 55 bp, synthetic construct
  misc_feature 1..55: note = Synthetic Primer
  misc_difference 21..23: note = n is a, c, g, t or u
  misc_difference 27..29: note = n is a, c, g, t or u
  modified_base 20: mod_base = OTHER; note = uracil
  modified_base 33: mod_base = OTHER; note = uracil
  modified_base 35: mod_base = OTHER; note = uracil
  modified_base 47: mod_base = OTHER; note = uracil
  modified_base 50..51: mod_base = OTHER; note = uracil
  modified_base 53: mod_base = OTHER; note = uracil
  source 1..55: mol_type = other DNA
tctgtacggtgacaaggcgtnnnactnnntgatctgcagcaaagactggttctca

SEQ ID NO: 477 - DNA, 55 bp, synthetic construct
  misc_feature 1..55: note = Synthetic Primer
  misc_difference 21..23: note = n is a, c, g, t or u
  misc_difference 27..29: note = n is a, c, g, t or u
  modified_base 20: mod_base = OTHER; note = uracil
  modified_base 33..34: mod_base = OTHER; note = uracil
  modified_base 39: mod_base = OTHER; note = uracil
  modified_base 47: mod_base = OTHER; note = uracil
  modified_base 49: mod_base = OTHER; note = uracil
  modified_base 52: mod_base = OTHER; note = uracil
  source 1..55: mol_type = other DNA
tctgtacggtgacaaggcgtnnnactnnntgattggaataaccagctgtcctcct

SEQ ID NO: 478 - DNA, 55 bp, synthetic construct
  misc_feature 1..55: note = Synthetic Primer
  misc_difference 21..23: note = n is a, c, g, t or u
  misc_difference 27..29: note = n is a, c, g, t or u
  modified_base 20: mod_base = OTHER; note = uracil
  modified_base 33: mod_base = OTHER; note = uracil
  modified_base 37: mod_base = OTHER; note = uracil
  modified_base 39..40: mod_base = OTHER; note = uracil
  modified_base 42: mod_base = OTHER; note = uracil
  modified_base 49..50: mod_base = OTHER; note = uracil
  modified_base 54: mod_base = OTHER; note = uracil
  source 1..55: mol_type = other DNA
tctgtacggtgacaaggcgtnnnactnnntgataggtattctcggaggttgcctt

SEQ ID NO: 479 - DNA, 55 bp, synthetic construct
  misc_feature 1..55: note = Synthetic Primer
  misc_difference 21..23: note = n is a, c, g, t or u
  misc_difference 27..29: note = n is a, c, g, t or u
  modified_base 20: mod_base = OTHER; note = uracil
  modified_base 33: mod_base = OTHER; note = uracil
  modified_base 36..37: mod_base = OTHER; note = uracil
  modified_base 41: mod_base = OTHER; note = uracil
  modified_base 52: mod_base = OTHER; note = uracil
  source 1..55: mol_type = other DNA
tctgtacggtgacaaggcgtnnnactnnntgatccttccctcgggaaaaactgac

SEQ ID NO: 480 - DNA, 55 bp, synthetic construct
  misc_feature 1..55: note = Synthetic Primer
  misc_difference 21..23: note = n is a, c, g, t or u
  misc_difference 27..29: note = n is a, c, g, t or u
  modified_base 20: mod_base = OTHER; note = uracil
  modified_base 33: mod_base = OTHER; note = uracil
  modified_base 44: mod_base = OTHER; note = uracil
  modified_base 48: mod_base = OTHER; note = uracil
  modified_base 52: mod_base = OTHER; note = uracil
  modified_base 54: mod_base = OTHER; note = uracil
  source 1..55: mol_type = other DNA
tctgtacggtgacaaggcgtnnnactnnntgatcccaagcacatggatcagtgtt

SEQ ID NO: 481 - DNA, 55 bp, synthetic construct
  misc_feature 1..55: note = Synthetic Primer
  misc_difference 21..23: note = n is a, c, g, t or u
  misc_difference 27..29: note = n is a, c, g, t or u
  modified_base 20: mod_base = OTHER; note = uracil
  modified_base 33: mod_base = OTHER; note = uracil
  modified_base 37: mod_base = OTHER; note = uracil
  modified_base 42..43: mod_base = OTHER; note = uracil
  modified_base 50: mod_base = OTHER; note = uracil
  source 1..55: mol_type = other DNA
tctgtacggtgacaaggcgtnnnactnnntgataagtacaattgcaggctgaacg

SEQ ID NO: 482 - DNA, 55 bp, synthetic construct
  misc_feature 1..55: note = Synthetic Primer
  misc_difference 21..23: note = n is a, c, g, t or u
  misc_difference 27..29: note = n is a, c, g, t or u
  modified_base 20: mod_base = OTHER; note = uracil
  modified_base 33..34: mod_base = OTHER; note = uracil
  modified_base 44: mod_base = OTHER; note = uracil
  modified_base 46: mod_base = OTHER; note = uracil
  source 1..55: mol_type = other DNA
tctgtacggtgacaaggcgtnnnactnnntgattaagcccacatatcaggaccga

SEQ ID NO: 483 - DNA, 55 bp, synthetic construct
  misc_feature 1..55: note = Synthetic Primer
  misc_difference 21..23: note = n is a, c, g, t or u
  misc_difference 27..29: note = n is a, c, g, t or u
  modified_base 20: mod_base = OTHER; note = uracil
  modified_base 33: mod_base = OTHER; note = uracil
  modified_base 39: mod_base = OTHER; note = uracil
  modified_base 47..48: mod_base = OTHER; note = uracil
  modified_base 50..51: mod_base = OTHER; note = uracil
  source 1..55: mol_type = other DNA
tctgtacggtgacaaggcgtnnnactnnntgatacacctggacaccttgttagat

SEQ ID NO: 484 - DNA, 55 bp, synthetic construct
  misc_feature 1..55: note = Synthetic Primer
  misc_difference 21..23: note = n is a, c, g, t or u
  misc_difference 27..29: note = n is a, c, g, t or u
  modified_base 20: mod_base = OTHER; note = uracil
  modified_base 33: mod_base = OTHER; note = uracil
  modified_base 35: mod_base = OTHER; note = uracil
  modified_base 37: mod_base = OTHER; note = uracil
  modified_base 41: mod_base = OTHER; note = uracil
  modified_base 43: mod_base = OTHER; note = uracil
  modified_base 49: mod_base = OTHER; note = uracil
  modified_base 51: mod_base = OTHER; note = uracil
  modified_base 53: mod_base = OTHER; note = uracil
  source 1..55: mol_type = other DNA
tctgtacggtgacaaggcgtnnnactnnntgatgtctggatctgcagctctatgg

SEQ ID NO: 485 - DNA, 55 bp, synthetic construct
  misc_feature 1..55: note = Synthetic Primer
  misc_difference 21..23: note = n is a, c, g, t or u
  misc_difference 27..29: note = n is a, c, g, t or u
  modified_base 20: mod_base = OTHER; note = uracil
  modified_base 33: mod_base = OTHER; note = uracil
  modified_base 37: mod_base = OTHER; note = uracil
  modified_base 54: mod_base = OTHER; note = uracil
  source 1..55: mol_type = other DNA
tctgtacggtgacaaggcgtnnnactnnntgatagctacagagacacaacccatt

SEQ ID NO: 486 - DNA, 55 bp, synthetic construct
  misc_feature 1..55: note = Synthetic Primer
  misc_difference 21..23: note = n is a, c, g, t or u
  misc_difference 27..29: note = n is a, c, g, t or u
  modified_base 20: mod_base = OTHER; note = uracil
  modified_base 33: mod_base = OTHER; note = uracil
  modified_base 38: mod_base = OTHER; note = uracil
  modified_base 54: mod_base = OTHER; note = uracil
  source 1..55: mol_type = other DNA
tctgtacggtgacaaggcgtnnnactnnntgatagaatcgcaagagaagcacctt

SEQ ID NO: 487 - DNA, 55 bp, synthetic construct
  misc_feature 1..55: note = Synthetic Primer
  misc_difference 21..23: note = n is a, c, g, t or u
  misc_difference 27..29: note = n is a, c, g, t or u
  modified_base 20: mod_base = OTHER; note = uracil
  modified_base 33: mod_base = OTHER; note = uracil
  modified_base 39: mod_base = OTHER; note = uracil
  modified_base 41..43: mod_base = OTHER; note = uracil
  modified_base 48: mod_base = OTHER; note = uracil
  source 1..55: mol_type = other DNA
tctgtacggtgacaaggcgtnnnactnnntgatccggctctttccactaaaccag

SEQ ID NO: 488 - DNA, 55 bp, synthetic construct
  misc_feature 1..55: note = Synthetic Primer
  misc_difference 21..23: note = n is a, c, g, t or u
  misc_difference 27..29: note = n is a, c, g, t or u
  modified_base 20: mod_base = OTHER; note = uracil
  modified_base 33..34: mod_base = OTHER; note = uracil
  modified_base 39: mod_base = OTHER; note = uracil
  modified_base 41..43: mod_base = OTHER; note = uracil
  modified_base 48..49: mod_base = OTHER; note = uracil
  modified_base 51..52: mod_base = OTHER; note = uracil
  source 1..55: mol_type = other DNA
tctgtacggtgacaaggcgtnnnactnnntgattgcagtgtttagcattcttggg

SEQ ID NO: 489 - DNA, 55 bp, synthetic construct
  misc_feature 1..55: note = Synthetic Primer
  misc_difference 21..23: note = n is a, c, g, t or u
  misc_difference 27..29: note = n is a, c, g, t or u
  modified_base 20: mod_base = OTHER; note = uracil
  modified_base 33: mod_base = OTHER; note = uracil
  modified_base 42: mod_base = OTHER; note = uracil
  modified_base 45: mod_base = OTHER; note = uracil
  modified_base 47: mod_base = OTHER; note = uracil
  source 1..55: mol_type = other DNA
tctgtacggtgacaaggcgtnnnactnnntgatagcaaaactactgtagagccca

SEQ ID NO: 490 - DNA, 55 bp, synthetic construct
  misc_feature 1..55: note = Synthetic Primer
  misc_difference 21..23: note = n is a, c, g, t or u
  misc_difference 27..29: note = n is a, c, g, t or u
  modified_base 20: mod_base = OTHER; note = uracil
  modified_base 33: mod_base = OTHER; note = uracil
  modified_base 35: mod_base = OTHER; note = uracil
  modified_base 38..41: mod_base = OTHER; note = uracil
  modified_base 44: mod_base = OTHER; note = uracil
  modified_base 47: mod_base = OTHER; note = uracil
  modified_base 50: mod_base = OTHER; note = uracil
  source 1..55: mol_type = other DNA
tctgtacggtgacaaggcgtnnnactnnntgatatccttttgctcctggtggaac

SEQ ID NO: 491 - DNA, 55 bp, synthetic construct
  misc_feature 1..55: note = Synthetic Primer
  misc_difference 21..23: note = n is a, c, g, t or u
  misc_difference 27..29: note = n is a, c, g, t or u
  modified_base 20: mod_base = OTHER; note = uracil
  modified_base 33: mod_base = OTHER; note = uracil
  modified_base 38: mod_base = OTHER; note = uracil
  modified_base 40..41: mod_base = OTHER; note = uracil
  modified_base 45: mod_base = OTHER; note = uracil
  modified_base 47: mod_base = OTHER; note = uracil
  source 1..55: mol_type = other DNA
tctgtacggtgacaaggcgtnnnactnnntgatgacatgttggatgtgaaggagc

SEQ ID NO: 492 - DNA, 55 bp, synthetic construct
  misc_feature 1..55: note = Synthetic Primer
  misc_difference 21..23: note = n is a, c, g, t or u
  misc_difference 27..29: note = n is a, c, g, t or u
  modified_base 20: mod_base = OTHER; note = uracil
  modified_base 33: mod_base = OTHER; note = uracil
  modified_base 35: mod_base = OTHER; note = uracil
  modified_base 45: mod_base = OTHER; note = uracil
  source 1..55: mol_type = other DNA
tctgtacggtgacaaggcgtnnnactnnntgatctccaccaaagtcaccagaggg

SEQ ID NO: 493 - DNA, 55 bp, synthetic construct
  misc_feature 1..55: note = Synthetic Primer
  misc_difference 21..23: note = n is a, c, g, t or u
  misc_difference 27..29: note = n is a, c, g, t or u
  modified_base 20: mod_base = OTHER; note = uracil
  modified_base 33: mod_base = OTHER; note = uracil
  modified_base 35: mod_base = OTHER; note = uracil
  modified_base 37..38: mod_base = OTHER; note = uracil
  modified_base 40: mod_base = OTHER; note = uracil
  source 1..55: mol_type = other DNA
tctgtacggtgacaaggcgtnnnactnnntgatgtcttatagcggaagaggcaga

SEQ ID NO: 494 - DNA, 55 bp, synthetic construct
  misc_feature 1..55: note = Synthetic Primer
  misc_difference 21..23: note = n is a, c, g, t or u
  misc_difference 27..29: note = n is a, c, g, t or u
  modified_base 20: mod_base = OTHER; note = uracil
  modified_base 33: mod_base = OTHER; note = uracil
  modified_base 41: mod_base = OTHER; note = uracil
  modified_base 50: mod_base = OTHER; note = uracil
  source 1..55: mol_type = other DNA
tctgtacggtgacaaggcgtnnnactnnntgatagagccatggacacactcaaga

SEQ ID NO: 495 - DNA, 55 bp, synthetic construct
  misc_feature 1..55: note = Synthetic Primer
  misc_difference 21..23: note = n is a, c, g, t or u
  misc_difference 27..29: note = n is a, c, g, t or u
  modified_base 20: mod_base = OTHER; note = uracil
  modified_base 33..34: mod_base = OTHER; note = uracil
  modified_base 36: mod_base = OTHER; note = uracil
  modified_base 38..39: mod_base = OTHER; note = uracil
  modified_base 41: mod_base = OTHER; note = uracil
  modified_base 45: mod_base = OTHER; note = uracil
  modified_base 48: mod_base = OTHER; note = uracil
  modified_base 52: mod_base = OTHER; note = uracil
  source 1..55: mol_type = other DNA
tctgtacggtgacaaggcgtnnnactnnntgattctcttctccatcgtccatgac

SEQ ID NO: 496 - DNA, 55 bp, synthetic construct
  misc_feature 1..55: note = Synthetic Primer
  misc_difference 21..23: note = n is a, c, g, t or u
  misc_difference 27..29: note = n is a, c, g, t or u
  modified_base 20: mod_base = OTHER; note = uracil
  modified_base 33: mod_base = OTHER; note = uracil
  modified_base 39..40: mod_base = OTHER; note = uracil
  modified_base 43: mod_base = OTHER; note = uracil
  modified_base 46: mod_base = OTHER; note = uracil
  modified_base 49: mod_base = OTHER; note = uracil
  modified_base 52: mod_base = OTHER; note = uracil
  source 1..55: mol_type = other DNA
tctgtacggtgacaaggcgtnnnactnnntgatgcagattcctcatggtcatggg

SEQ ID NO: 497 - DNA, 55 bp, synthetic construct
  misc_feature 1..55: note = Synthetic Primer
  misc_difference 21..23: note = n is a, c, g, t or u
  misc_difference 27..29: note = n is a, c, g, t or u
  modified_base 20: mod_base = OTHER; note = uracil
  modified_base 33..34: mod_base = OTHER; note = uracil
  modified_base 42: mod_base = OTHER; note = uracil
  modified_base 45: mod_base = OTHER; note = uracil
  modified_base 51..52: mod_base = OTHER; note = uracil
  source 1..55: mol_type = other DNA
tctgtacggtgacaaggcgtnnnactnnntgattgaagaactagtccagcttcga

SEQ ID NO: 498 - DNA, 55 bp, synthetic construct
  misc_feature 1..55: note = Synthetic Primer
  misc_difference 21..23: note = n is a, c, g, t or u
  misc_difference 27..29: note = n is a, c, g, t or u
  modified_base 20: mod_base = OTHER; note = uracil
  modified_base 33: mod_base = OTHER; note = uracil
  modified_base 38: mod_base = OTHER; note = uracil
  modified_base 47: mod_base = OTHER; note = uracil
  modified_base 49..51: mod_base = OTHER; note = uracil
  modified_base 53..54: mod_base = OTHER; note = uracil
  source 1..55: mol_type = other DNA
tctgtacggtgacaaggcgtnnnactnnntgataacctgcgcaaactctttgttc

SEQ ID NO: 499 - DNA, 55 bp, synthetic construct
  misc_feature 1..55: note = Synthetic Primer
  misc_difference 21..23: note = n is a, c, g, t or u
  misc_difference 27..29: note = n is a, c, g, t or u
  modified_base 20: mod_base = OTHER; note = uracil
  modified_base 33..34: mod_base = OTHER; note = uracil
  modified_base 39..40: mod_base = OTHER; note = uracil
  modified_base 43: mod_base = OTHER; note = uracil
  modified_base 52..53: mod_base = OTHER; note = uracil
  source 1..55: mol_type = other DNA
tctgtacggtgacaaggcgtnnnactnnntgattcaagttggtgaaaaggcttgg

SEQ ID NO: 500 - DNA, 55 bp, synthetic construct
  misc_feature 1..55: note = Synthetic Primer
  misc_difference 21..23: note = n is a, c, g, t or u
  misc_difference 27..29: note = n is a, c, g, t or u
  modified_base 20: mod_base = OTHER; note = uracil
  modified_base 33: mod_base = OTHER; note = uracil
  modified_base 38..39: mod_base = OTHER; note = uracil
  modified_base 45: mod_base = OTHER; note = uracil
  modified_base 49: mod_base = OTHER; note = uracil
  modified_base 51: mod_base = OTHER; note = uracil
  modified_base 54: mod_base = OTHER; note = uracil
  source 1..55: mol_type = other DNA
tctgtacggtgacaaggcgtnnnactnnntgatcaagttgaccctgggtctgatc

SEQ ID NO: 501 - DNA, 55 bp, synthetic construct
  misc_feature 1..55: note = Synthetic Primer
  misc_difference 21..23: note = n is a, c, g, t or u
  misc_difference 27..29: note = n is a, c, g, t or u
  modified_base 20: mod_base = OTHER; note = uracil
  modified_base 33: mod_base = OTHER; note = uracil
  modified_base 48: mod_base = OTHER; note = uracil
  modified_base 51: mod_base = OTHER; note = uracil
  source 1..55: mol_type = other DNA
tctgtacggtgacaaggcgtnnnactnnntgatggaggaaaagaggatgctggag

SEQ ID NO: 502 - DNA, 55 bp, synthetic construct
  misc_feature 1..55: note = Synthetic Primer
  misc_difference 21..23: note = n is a, c, g, t or u
  misc_difference 27..29: note = n is a, c, g, t or u
  modified_base 20: mod_base = OTHER; note = uracil
  modified_base 33..34: mod_base = OTHER; note = uracil
  modified_base 40: mod_base = OTHER; note = uracil
  modified_base 45: mod_base = OTHER; note = uracil
  modified_base 47: mod_base = OTHER; note = uracil
  modified_base 49: mod_base = OTHER; note = uracil
  modified_base 53: mod_base = OTHER; note = uracil
  source 1..55: mol_type = other DNA
tctgtacggtgacaaggcgtnnnactnnntgattgaacgtaaaatgtgtcgctcc

SEQ ID NO: 503 - DNA, 55 bp, synthetic construct
  misc_feature 1..55: note = Synthetic Primer
  misc_difference 21..23: note = n is a, c, g, t or u
  misc_difference 27..29: note = n is a, c, g, t or u
  modified_base 20: mod_base = OTHER; note = uracil
  modified_base 33: mod_base = OTHER; note = uracil
  modified_base 36: mod_base = OTHER; note = uracil
  modified_base 38: mod_base = OTHER; note = uracil
  modified_base 41: mod_base = OTHER; note = uracil
  modified_base 47: mod_base = OTHER; note = uracil
  modified_base 54: mod_base = OTHER; note = uracil
  source 1..55: mol_type = other DNA
tctgtacggtgacaaggcgtnnnactnnntgatcatgtgctgaaaatccgaagtg

SEQ ID NO: 504 - DNA, 55 bp, synthetic construct
  misc_feature 1..55: note = Synthetic Primer
  misc_difference 21..23: note = n is a, c, g, t or u
  misc_difference 27..29: note = n is a, c, g, t or u
  modified_base 20: mod_base = OTHER; note = uracil
  modified_base 33: mod_base = OTHER; note = uracil
  modified_base 36..37: mod_base = OTHER; note = uracil
  modified_base 40: mod_base = OTHER; note = uracil
  modified_base 44: mod_base = OTHER; note = uracil
  source 1..55: mol_type = other DNA
tctgtacggtgacaaggcgtnnnactnnntgatccttaatgcctcagaaaccaca

SEQ ID NO: 505 - DNA, 55 bp, synthetic construct
  misc_feature 1..55: note = Synthetic Primer
  misc_difference 21..23: note = n is a, c, g, t or u
  misc_difference 27..29: note = n is a, c, g, t or u
  modified_base 20: mod_base = OTHER; note = uracil
  modified_base 33: mod_base = OTHER; note = uracil
  modified_base 36..37: mod_base = OTHER; note = uracil
  modified_base 39..40: mod_base = OTHER; note = uracil
  source 1..55: mol_type = other DNA
tctgtacggtgacaaggcgtnnnactnnntgatacttcttggccaagaggaagac

SEQ ID NO: 506 - DNA, 55 bp, synthetic construct
  misc_feature 1..55: note = Synthetic Primer
  misc_difference 21..23: note = n is a, c, g, t or u
  misc_difference 27..29: note = n is a, c, g, t or u
  modified_base 20: mod_base = OTHER; note = uracil
  modified_base 33: mod_base = OTHER; note = uracil
  modified_base 35..36: mod_base = OTHER; note = uracil
  modified_base 42: mod_base = OTHER; note = uracil
  modified_base 45..47: mod_base = OTHER; note = uracil
  source 1..55: mol_type = other DNA
tctgtacggtgacaaggcgtnnnactnnntgatattggagatggtttcacagcac

SEQ ID NO: 507 - DNA, 55 bp, synthetic construct
  misc_feature 1..55: note = Synthetic Primer
  misc_difference 21..23: note = n is a, c, g, t or u
  misc_difference 27..29: note = n is a, c, g, t or u
  modified_base 20: mod_base = OTHER; note = uracil
  modified_base 33: mod_base = OTHER; note = uracil
  modified_base 38: mod_base = OTHER; note = uracil
  modified_base 40: mod_base = OTHER; note = uracil
  modified_base 50: mod_base = OTHER; note = uracil
  modified_base 52..54: mod_base = OTHER; note = uracil
  source 1..55: mol_type = other DNA
tctgtacggtgacaaggcgtnnnactnnntgatggaatctcccaggcggtatttg

SEQ ID NO: 508 - DNA, 55 bp, synthetic construct
  misc_feature 1..55: note = Synthetic Primer
  misc_difference 21..23: note = n is a, c, g, t or u
  misc_difference 27..29: note = n is a, c, g, t or u
  modified_base 20: mod_base = OTHER; note = uracil
  modified_base 33: mod_base = OTHER; note = uracil
  modified_base 39: mod_base = OTHER; note = uracil
  modified_base 48..51: mod_base = OTHER; note = uracil
  modified_base 54: mod_base = OTHER; note = uracil
  source 1..55: mol_type = other DNA
tctgtacggtgacaaggcgtnnnactnnntgatcgcactgccccaagttttacta

SEQ ID NO: 509 - DNA, 55 bp, synthetic construct
  misc_feature 1..55: note = Synthetic Primer
  misc_difference 21..23: note = n is a, c, g, t or u
  misc_difference 27..29: note = n is a, c, g, t or u
  modified_base 20: mod_base = OTHER; note = uracil
  modified_base 33: mod_base = OTHER; note = uracil
  modified_base 46: mod_base = OTHER; note = uracil
  modified_base 48: mod_base = OTHER; note = uracil
  source 1..55: mol_type = other DNA
tctgtacggtgacaaggcgtnnnactnnntgatgaagacgaaaactctgcggaag

SEQ ID NO: 510 - DNA, 55 bp, synthetic construct
  misc_feature 1..55: note = Synthetic Primer
  misc_difference 21..23: note = n is a, c, g, t or u
  misc_difference 27..29: note = n is a, c, g, t or u
  modified_base 20: mod_base = OTHER; note = uracil
  modified_base 33..34: mod_base = OTHER; note = uracil
  modified_base 37: mod_base = OTHER; note = uracil
  modified_base 40: mod_base = OTHER; note = uracil
  modified_base 42..43: mod_base = OTHER; note = uracil
  modified_base 47: mod_base = OTHER; note = uracil
  modified_base 52..53: mod_base = OTHER; note = uracil
  source 1..55: mol_type = other DNA
tctgtacggtgacaaggcgtnnnactnnntgattgatcctcttccctcagcttcc

SEQ ID NO: 511 - DNA, 55 bp, synthetic construct
  misc_feature 1..55: note = Synthetic Primer
  misc_difference 21..23: note = n is a, c, g, t or u
  misc_difference 27..29: note = n is a, c, g, t or u
  modified_base 20: mod_base = OTHER; note = uracil
  modified_base 33: mod_base = OTHER; note = uracil
  modified_base 38: mod_base = OTHER; note = uracil
  modified_base 42: mod_base = OTHER; note = uracil
  modified_base 45: mod_base = OTHER; note = uracil
  modified_base 50: mod_base = OTHER; note = uracil
  source 1..55: mol_type = other DNA
tctgtacggtgacaaggcgtnnnactnnntgatgagatcactgatgacctgcact

SEQ ID NO: 512 - DNA, 55 bp, synthetic construct
  misc_feature 1..55: note = Synthetic Primer
  misc_difference 21..23: note = n is a, c, g, t or u
  misc_difference 27..29: note = n is a, c, g, t or u
  modified_base 20: mod_base = OTHER; note = uracil
  modified_base 33: mod_base = OTHER; note = uracil
  modified_base 37..38: mod_base = OTHER; note = uracil
  modified_base 42: mod_base = OTHER; note = uracil
  modified_base 47: mod_base = OTHER; note = uracil
  modified_base 50: mod_base = OTHER; note = uracil
  source 1..55: mol_type = other DNA
tctgtacggtgacaaggcgtnnnactnnntgatgccttcaatgcactgatacaca

SEQ ID NO: 513 - DNA, 55 bp, synthetic construct
  misc_feature 1..55: note = Synthetic Primer
  misc_difference 21..23: note = n is a, c, g, t or u
  misc_difference 27..29: note = n is a, c, g, t or u
  modified_base 20: mod_base = OTHER; note = uracil
  modified_base 33..34: mod_base = OTHER; note = uracil
  modified_base 36: mod_base = OTHER; note = uracil
  modified_base 38: mod_base = OTHER; note = uracil
  modified_base 44..46: mod_base = OTHER; note = uracil
  modified_base 50..51: mod_base = OTHER; note = uracil
  source 1..55: mol_type = other DNA
tctgtacggtgacaaggcgtnnnactnnntgattatgtcagcgtttggcttaaca

SEQ ID NO: 514 - DNA, 55 bp, synthetic construct
  misc_feature 1..55: note = Synthetic Primer
  misc_difference 21..23: note = n is a, c, g, t or u
  misc_difference 27..29: note = n is a, c, g, t or u
  modified_base 20: mod_base = OTHER; note = uracil
  modified_base 33: mod_base = OTHER; note = uracil
  modified_base 40: mod_base = OTHER; note = uracil
  modified_base 42: mod_base = OTHER; note = uracil
  modified_base 51: mod_base = OTHER; note = uracil
  source 1..55: mol_type = other DNA
tctgtacggtgacaaggcgtnnnactnnntgatccaccatatacaggagctcaga

SEQ ID NO: 515 - DNA, 55 bp, synthetic construct
  misc_feature 1..55: note = Synthetic Primer
  misc_difference 21..23: note = n is a, c, g, t or u
  misc_difference 27..29: note = n is a, c, g, t or u
  modified_base 20: mod_base = OTHER; note = uracil
  modified_base 33..34: mod_base = OTHER; note = uracil
  modified_base 36: mod_base = OTHER; note = uracil
  modified_base 38..40: mod_base = OTHER; note = uracil
  source 1..55: mol_type = other DNA
tctgtacggtgacaaggcgtnnnactnnntgattgtctttggaaccacaccagaa

SEQ ID NO: 516 - DNA, 55 bp, synthetic construct
  misc_feature 1..55: note = Synthetic Primer
  misc_difference 21..23: note = n is a, c, g, t or u
  misc_difference 27..29: note = n is a, c, g, t or u
  modified_base 20: mod_base = OTHER; note = uracil
  modified_base 33..35: mod_base = OTHER; note = uracil
  modified_base 38: mod_base = OTHER; note = uracil
  modified_base 42: mod_base = OTHER; note = uracil
  modified_base 47: mod_base = OTHER; note = uracil
  modified_base 51: mod_base = OTHER; note = uracil
  modified_base 53: mod_base = OTHER; note = uracil
  source 1..55: mol_type = other DNA
tctgtacggtgacaaggcgtnnnactnnntgatttgatagctgcactgagtgtca

SEQ ID NO: 517 - DNA, 55 bp, synthetic construct
  misc_feature 1..55: note = Synthetic Primer
  misc_difference 21..23: note = n is a, c, g, t or u
  misc_difference 27..29: note = n is a, c, g, t or u
  modified_base 20: mod_base = OTHER; note = uracil
  modified_base 33: mod_base = OTHER; note = uracil
  modified_base 38: mod_base = OTHER; note = uracil
  modified_base 42: mod_base = OTHER; note = uracil
  source 1..55: mol_type = other DNA
tctgtacggtgacaaggcgtnnnactnnntgatgacctggatccacaggaaagaa

SEQ ID NO: 518 - DNA, 55 bp, synthetic construct
  misc_feature 1..55: note = Synthetic Primer
  misc_difference 21..23: note = n is a, c, g, t or u
  misc_difference 27..29: note = n is a, c, g, t or u
  modified_base 20: mod_base = OTHER; note = uracil
  modified_base 33: mod_base = OTHER; note = uracil
  modified_base 38..39: mod_base = OTHER; note = uracil
  modified_base 42..43: mod_base = OTHER; note = uracil
  modified_base 45: mod_base = OTHER; note = uracil
  modified_base 50: mod_base = OTHER; note = uracil
  source 1..55: mol_type = other DNA
tctgtacggtgacaaggcgtnnnactnnntgatggacttgcttctgcactagaca

SEQ ID NO: 519 - DNA, 55 bp, synthetic construct
  misc_feature 1..55: note = Synthetic Primer
  misc_difference 21..23: note = n is a, c, g, t or u
  misc_difference 27..29: note = n is a, c, g, t or u
  modified_base 20: mod_base = OTHER; note = uracil
  modified_base 33: mod_base = OTHER; note = uracil
  modified_base 36: mod_base = OTHER; note = uracil
  modified_base 41: mod_base = OTHER; note = uracil
  modified_base 48: mod_base = OTHER; note = uracil
  modified_base 53: mod_base = OTHER; note = uracil
  source 1..55: mol_type = other DNA
tctgtacggtgacaaggcgtnnnactnnntgatgatgacctggaagatggagtct

SEQ ID NO: 520 - DNA, 55 bp, synthetic construct
  misc_feature 1..55: note = Synthetic Primer
  misc_difference 21..23: note = n is a, c, g, t or u
  misc_difference 27..29: note = n is a, c, g, t or u
  modified_base 20: mod_base = OTHER; note = uracil
  modified_base 33: mod_base = OTHER; note = uracil
  modified_base 37: mod_base = OTHER; note = uracil
  modified_base 47: mod_base = OTHER; note = uracil
  source 1..55: mol_type = other DNA
tctgtacggtgacaaggcgtnnnactnnntgatagctggaagaagctgaaaaagc

SEQ ID NO: 521 - DNA, 55 bp, synthetic construct
  misc_feature 1..55: note = Synthetic Primer
  misc_difference 21..23: note = n is a, c, g, t or u
  misc_difference 27..29: note = n is a, c, g, t or u
  modified_base 20: mod_base = OTHER; note = uracil
  modified_base 33: mod_base = OTHER; note = uracil
  modified_base 45..46: mod_base = OTHER; note = uracil
  modified_base 54: mod_base = OTHER; note = uracil
  source 1..55: mol_type = other DNA
tctgtacggtgacaaggcgtnnnactnnntgatagagagaacggttgcaaaactg

SEQ ID NO: 522 - DNA, 55 bp, synthetic construct
  misc_feature 1..55: note = Synthetic Primer
  misc_difference 21..23: note = n is a, c, g, t or u
  misc_difference 27..29: note = n is a, c, g, t or u
  modified_base 20: mod_base = OTHER; note = uracil
  modified_base 33: mod_base = OTHER; note = uracil
  modified_base 37: mod_base = OTHER; note = uracil
  modified_base 42: mod_base = OTHER; note = uracil
  modified_base 45: mod_base = OTHER; note = uracil
  modified_base 52: mod_base = OTHER; note = uracil
  source 1..55: mol_type = other DNA
tctgtacggtgacaaggcgtnnnactnnntgatagctacagtgatgcccactaca

SEQ ID NO: 523 - DNA, 55 bp, synthetic construct
  misc_feature 1..55: note = Synthetic Primer
  misc_difference 21..23: note = n is a, c, g, t or u
  misc_difference 27..29: note = n is a, c, g, t or u
  modified_base 20: mod_base = OTHER; note = uracil
  modified_base 33: mod_base = OTHER; note = uracil
  modified_base 36: mod_base = OTHER; note = uracil
  modified_base 49: mod_base = OTHER; note = uracil
  modified_base 54: mod_base = OTHER; note = uracil
  source 1..55: mol_type = other DNA
tctgtacggtgacaaggcgtnnnactnnntgatcctcaaacagaacggtccagtc

SEQ ID NO: 524 - DNA, 55 bp, synthetic construct
  misc_feature 1..55: note = Synthetic Primer
  misc_difference 21..23: note = n is a, c, g, t or u
  misc_difference 27..29: note = n is a, c, g, t or u
  modified_base 20: mod_base = OTHER; note = uracil
  modified_base 33: mod_base = OTHER; note = uracil
  modified_base 36: mod_base = OTHER; note = uracil
  modified_base 41: mod_base = OTHER; note = uracil
  source 1..55: mol_type = other DNA
tctgtacggtgacaaggcgtnnnactnnntgatgctcagctagaagagaagcagc

SEQ ID NO: 525 - DNA, 55 bp, synthetic construct
  misc_feature 1..55: note = Synthetic Primer
  misc_difference 21..23: note = n is a, c, g, t or u
  misc_difference 27..29: note = n is a, c, g, t or u
  modified_base 20: mod_base = OTHER; note = uracil
  modified_base 33: mod_base = OTHER; note = uracil
  modified_base 39: mod_base = OTHER; note = uracil
  modified_base 42..44: mod_base = OTHER; note = uracil
  modified_base 51: mod_base = OTHER; note = uracil
  modified_base 54: mod_base = OTHER; note = uracil
  source 1..55: mol_type = other DNA
tctgtacggtgacaaggcgtnnnactnnntgatgggagtgatttgcgccatcatc

SEQ ID NO: 526 - DNA, 55 bp, synthetic construct
  misc_feature 1..55: note = Synthetic Primer
  misc_difference 21..23: note = n is a, c, g, t or u
  misc_difference 27..29: note = n is a, c, g, t or u
  modified_base 20: mod_base = OTHER; note = uracil
  modified_base 33..34: mod_base = OTHER; note = uracil
  modified_base 40: mod_base = OTHER; note = uracil
  modified_base 43: mod_base = OTHER; note = uracil
  modified_base 50..52: mod_base = OTHER; note = uracil
  source 1..55: mol_type = other DNA
tctgtacggtgacaaggcgtnnnactnnntgattccccctgatagcagatttgat

SEQ ID NO: 527 - DNA, 55 bp, synthetic construct
  misc_feature 1..55: note = Synthetic Primer
  misc_difference 21..23: note = n is a, c, g, t or u
  misc_difference 27..29: note = n is a, c, g, t or u
  modified_base 20: mod_base = OTHER; note = uracil
  modified_base 33: mod_base = OTHER; note = uracil
  modified_base 35: mod_base = OTHER; note = uracil
  modified_base 42: mod_base = OTHER; note = uracil
  source 1..55: mol_type = other DNA
tctgtacggtgacaaggcgtnnnactnnntgatataccagctgaagagcgacaag

SEQ ID NO: 528 - DNA, 55 bp, synthetic construct
  misc_feature 1..55: note = Synthetic Primer
  misc_difference 21..23: note = n is a, c, g, t or u
  misc_difference 27..29: note = n is a, c, g, t or u
  modified_base 20: mod_base = OTHER; note = uracil
  modified_base 33: mod_base = OTHER; note = uracil
  modified_base 40..41: mod_base = OTHER; note = uracil
  modified_base 44: mod_base = OTHER; note = uracil
  modified_base 46: mod_base = OTHER; note = uracil
  source 1..55: mol_type = other DNA
tctgtacggtgacaaggcgtnnnactnnntgatcaaacattcgtctcggaaaccc

SEQ ID NO: 529 - DNA, 55 bp, synthetic construct
  misc_feature 1..55: note = Synthetic Primer
  misc_difference 21..23: note = n is a, c, g, t or u
  misc_difference 27..29: note = n is a, c, g, t or u
  modified_base 20: mod_base = OTHER; note = uracil
  modified_base 33..35: mod_base = OTHER; note = uracil
  modified_base 38: mod_base = OTHER; note = uracil
  modified_base 41..44: mod_base = OTHER; note = uracil
  modified_base 49: mod_base = OTHER; note = uracil
  source 1..55: mol_type = other DNA
tctgtacggtgacaaggcgtnnnactnnntgatttggtgattttggcatgagcag

SEQ ID NO: 530 - DNA, 55 bp, synthetic construct
  misc_feature 1..55: note = Synthetic Primer
  misc_difference 21..23: note = n is a, c, g, t or u
  misc_difference 27..29: note = n is a, c, g, t or u
  modified_base 20: mod_base = OTHER; note = uracil
  modified_base 33..34: mod_base = OTHER; note = uracil
  modified_base 41..42: mod_base = OTHER; note = uracil
  modified_base 49: mod_base = OTHER; note = uracil
  source 1..55: mol_type = other DNA
tctgtacggtgacaaggcgtnnnactnnntgattccgagattggagcctaacagt

SEQ ID NO: 531 - DNA, 55 bp, synthetic construct
  misc_feature 1..55: note = Synthetic Primer
  misc_difference 21..23: note = n is a, c, g, t or u
  misc_difference 27..29: note = n is a, c, g, t or u
  modified_base 20: mod_base = OTHER; note = uracil
  modified_base 33: mod_base = OTHER; note = uracil
  modified_base 43: mod_base = OTHER; note = uracil
  modified_base 45..46: mod_base = OTHER; note = uracil
  modified_base 51: mod_base = OTHER; note = uracil
  source 1..55: mol_type = other DNA
tctgtacggtgacaaggcgtnnnactnnntgatcagcaagaatattcccctggca

SEQ ID NO: 532 - DNA, 55 bp, synthetic construct
  misc_feature 1..55: note = Synthetic Primer
  misc_difference 21..23: note = n is a, c, g, t or u
  misc_difference 27..29: note = n is a, c, g, t or u
  modified_base 20: mod_base = OTHER; note = uracil
  modified_base 33..34: mod_base = OTHER; note = uracil
  modified_base 36: mod_base = OTHER; note = uracil
  modified_base 39..41: mod_base = OTHER; note = uracil
  modified_base 45: mod_base = OTHER; note = uracil
  modified_base 52: mod_base = OTHER; note = uracil
  modified_base 54: mod_base = OTHER; note = uracil
  source 1..55: mol_type = other DNA
tctgtacggtgacaaggcgtnnnactnnntgattctcatttgcctggcagatctc

SEQ ID NO: 533 - DNA, 55 bp, synthetic construct
  misc_feature 1..55: note = Synthetic Primer
  misc_difference 21..23: note = n is a, c, g, t or u
  misc_difference 27..29: note = n is a, c, g, t or u
  modified_base 20: mod_base = OTHER; note = uracil
  modified_base 33: mod_base = OTHER; note = uracil
  modified_base 38: mod_base = OTHER; note = uracil
  modified_base 50: mod_base = OTHER; note = uracil
  source 1..55: mol_type = other DNA
tctgtacggtgacaaggcgtnnnactnnntgatgacatcagcaaagacctggaga

SEQ ID NO: 534 - DNA, 55 bp, synthetic construct
  misc_feature 1..55: note = Synthetic Primer
  misc_difference 21..23: note = n is a, c, g, t or u
  misc_difference 27..29: note = n is a, c, g, t or u
  modified_base 20: mod_base = OTHER; note = uracil
  modified_base 33: mod_base = OTHER; note = uracil
  modified_base 39..40: mod_base = OTHER; note = uracil
  modified_base 43: mod_base = OTHER; note = uracil
  modified_base 46: mod_base = OTHER; note = uracil
  modified_base 52: mod_base = OTHER; note = uracil
  source 1..55: mol_type = other DNA
tctgtacggtgacaaggcgtnnnactnnntgatagaacttgctggtgaaaatcgg

SEQ ID NO: 535 - DNA, 56 bp, synthetic construct
  misc_feature 1..56: note = Synthetic Primer
  misc_difference 21..23: note = n is a, c, g, t or u
  misc_difference 27..29: note = n is a, c, g, t or u
  modified_base 20: mod_base = OTHER; note = uracil
  modified_base 33: mod_base = OTHER; note = uracil
  modified_base 37: mod_base = OTHER; note = uracil
  modified_base 39: mod_base = OTHER; note = uracil
  modified_base 41: mod_base = OTHER; note = uracil
  modified_base 43: mod_base = OTHER; note = uracil
  modified_base 45..46: mod_base = OTHER; note = uracil
  modified_base 48: mod_base = OTHER; note = uracil
  modified_base 53: mod_base = OTHER; note = uracil
  source 1..56: mol_type = other DNA
tctgtacggtgacaaggcgtnnnactnnntgatgcctctctctcttgtcacgtagc

SEQ ID NO: 536 - DNA, 56 bp, synthetic construct
  misc_feature 1..56: note = Synthetic Primer
  misc_difference 21..23: note = n is a, c, g, t or u
  misc_difference 27..29: note = n is a, c, g, t or u
  modified_base 20: mod_base = OTHER; note = uracil
  modified_base 33: mod_base = OTHER; note = uracil
  modified_base 39..41: mod_base = OTHER; note = uracil
  modified_base 43: mod_base = OTHER; note = uracil
  modified_base 45..48: mod_base = OTHER; note = uracil
  modified_base 51: mod_base = OTHER; note = uracil
  modified_base 53: mod_base = OTHER; note = uracil
  source 1..56: mol_type = other DNA
tctgtacggtgacaaggcgtnnnactnnntgatggccatttctgttttcctgtagc

SEQ ID NO: 537 - DNA, 56 bp, synthetic construct
  misc_feature 1..56: note = Synthetic Primer
  misc_difference 21..23: note = n is a, c, g, t or u
  misc_difference 27..29: note = n is a, c, g, t or u
  modified_base 20: mod_base = OTHER; note = uracil
  modified_base 33: mod_base = OTHER; note = uracil
  modified_base 35..36: mod_base = OTHER; note = uracil
  modified_base 41: mod_base = OTHER; note = uracil
  modified_base 43: mod_base = OTHER; note = uracil
  modified_base 46: mod_base = OTHER; note = uracil
  modified_base 49: mod_base = OTHER; note = uracil
  modified_base 51: mod_base = OTHER; note = uracil
  modified_base 53..54: mod_base = OTHER; note = uracil
  source 1..56: mol_type = other DNA
tctgtacggtgacaaggcgtnnnactnnntgatcttcgcctgtcctcatgtattgg

SEQ ID NO: 538 - DNA, 56 bp, synthetic construct
  misc_feature 1..56: note = Synthetic Primer
  misc_difference 21..23: note = n is a, c, g, t or u
  misc_difference 27..29: note = n is a, c, g, t or u
  modified_base 20: mod_base = OTHER; note = uracil
  modified_base 33: mod_base = OTHER; note = uracil
  modified_base 35: mod_base = OTHER; note = uracil
  modified_base 42..44: mod_base = OTHER; note = uracil
  modified_base 52: mod_base = OTHER; note = uracil
  source 1..56: mol_type = other DNA
tctgtacggtgacaaggcgtnnnactnnntgatatccgggctttacgcaaataagt

SEQ ID NO: 539 - DNA, 56 bp, synthetic construct
  misc_feature 1..56: note = Synthetic Primer
  misc_difference 21..23: note = n is a, c, g, t or u
  misc_difference 27..29: note = n is a, c, g, t or u
  modified_base 20: mod_base = OTHER; note = uracil
  modified_base 33..34: mod_base = OTHER; note = uracil
  modified_base 38..40: mod_base = OTHER; note = uracil
  modified_base 46: mod_base = OTHER; note = uracil
  modified_base 50: mod_base = OTHER; note = uracil
  modified_base 53: mod_base = OTHER; note = uracil
  source 1..56: mol_type = other DNA
tctgtacggtgacaaggcgtnnnactnnntgattggatttgaccctccatgatcag

SEQ ID NO: 540 - DNA, 56 bp, synthetic construct
  misc_feature 1..56: note = Synthetic Primer
  misc_difference 21..23: note = n is a, c, g, t or u
  misc_difference 27..29: note = n is a, c, g, t or u
  modified_base 20: mod_base = OTHER; note = uracil
  modified_base 33: mod_base = OTHER; note = uracil
  modified_base 35: mod_base = OTHER; note = uracil
  modified_base 37: mod_base = OTHER; note = uracil
  modified_base 39: mod_base = OTHER; note = uracil
  modified_base 46: mod_base = OTHER; note = uracil
  modified_base 51: mod_base = OTHER; note = uracil
  source 1..56: mol_type = other DNA
tctgtacggtgacaaggcgtnnnactnnntgatatctgtacagcatgaagtgcaag

SEQ ID NO: 541 - DNA, 56 bp, synthetic construct
  misc_feature 1..56: note = Synthetic Primer
  misc_difference 21..23: note = n is a, c, g, t or u
  misc_difference 27..29: note = n is a, c, g, t or u
  modified_base 20: mod_base = OTHER; note = uracil
  modified_base 33: mod_base = OTHER; note = uracil
  modified_base 36: mod_base = OTHER; note = uracil
  modified_base 39: mod_base = OTHER; note = uracil
  modified_base 45: mod_base = OTHER; note = uracil
  modified_base 51: mod_base = OTHER; note = uracil
  source 1..56: mol_type = other DNA
tctgtacggtgacaaggcgtnnnactnnntgatagtcgtcagcctgaacataacat

SEQ ID NO: 542 - DNA, 56 bp, synthetic construct
  misc_feature 1..56: note = Synthetic Primer
  misc_difference 21..23: note = n is a, c, g, t or u
  misc_difference 27..29: note = n is a, c, g, t or u
  modified_base 20: mod_base = OTHER; note = uracil
  modified_base 33..34: mod_base = OTHER; note = uracil
  modified_base 37..38: mod_base = OTHER; note = uracil
  modified_base 40: mod_base = OTHER; note = uracil
  modified_base 45: mod_base = OTHER; note = uracil
  source 1..56: mol_type = other DNA
tctgtacggtgacaaggcgtnnnactnnntgattgcttctcagatgaaaccaccag

SEQ ID NO: 543 - DNA, 56 bp, synthetic construct
  misc_feature 1..56: note = Synthetic Primer
  misc_difference 21..23: note = n is a, c, g, t or u
  misc_difference 27..29: note = n is a, c, g, t or u
  modified_base 20: mod_base = OTHER; note = uracil
  modified_base 33: mod_base = OTHER; note = uracil
  modified_base 36: mod_base = OTHER; note = uracil
  modified_base 42..43: mod_base = OTHER; note = uracil
  modified_base 47..49: mod_base = OTHER; note = uracil
  modified_base 53: mod_base = OTHER; note = uracil
  source 1..56: mol_type = other DNA
tctgtacggtgacaaggcgtnnnactnnntgatgctgcaccttgactttaagtgag

SEQ ID NO: 544 - DNA, 56 bp, synthetic construct
  misc_feature 1..56: note = Synthetic Primer
  misc_difference 21..23: note = n is a, c, g, t or u
  misc_difference 27..29: note = n is a, c, g, t or u
  modified_base 20: mod_base = OTHER; note = uracil
  modified_base 33: mod_base = OTHER; note = uracil
  modified_base 41: mod_base = OTHER; note = uracil
  modified_base 44: mod_base = OTHER; note = uracil
  modified_base 47: mod_base = OTHER; note = uracil
  modified_base 51: mod_base = OTHER; note = uracil
  modified_base 53: mod_base = OTHER; note = uracil
  source 1..56: mol_type = other DNA
tctgtacggtgacaaggcgtnnnactnnntgatccgagaatggtcataaatgtgca

SEQ ID NO: 545 - DNA, 56 bp, synthetic construct
  misc_feature 1..56: note = Synthetic Primer
  misc_difference 21..23: note = n is a, c, g, t or u
  misc_difference 27..29: note = n is a, c, g, t or u
  modified_base 20: mod_base = OTHER; note = uracil
  modified_base 33: mod_base = OTHER; note = uracil
  modified_base 37: mod_base = OTHER; note = uracil
  modified_base 39: mod_base = OTHER; note = uracil
  modified_base 45: mod_base = OTHER; note = uracil
  modified_base 47: mod_base = OTHER; note = uracil
  modified_base 52: mod_base = OTHER; note = uracil
  modified_base 54: mod_base = OTHER; note = uracil
  source 1..56: mol_type = other DNA
tctgtacggtgacaaggcgtnnnactnnntgatcactatggagctctcacatgtgg

SEQ ID NO: 546 - DNA, 56 bp, synthetic construct
  misc_feature 1..56: note = Synthetic Primer
  misc_difference 21..23: note = n is a, c, g, t or u
  misc_difference 27..29: note = n is a, c, g, t or u
  modified_base 20: mod_base = OTHER; note = uracil
  modified_base 33: mod_base = OTHER; note = uracil
  modified_base 50: mod_base = OTHER; note = uracil
  modified_base 52: mod_base = OTHER; note = uracil
  source 1..56: mol_type = other DNA
tctgtacggtgacaaggcgtnnnactnnntgatacccgaagaaagagactctggaa

SEQ ID NO: 547 - DNA, 56 bp, synthetic construct
  misc_feature 1..56: note = Synthetic Primer
  misc_difference 21..23: note = n is a, c, g, t or u
  misc_difference 27..29: note = n is a, c, g, t or u
  modified_base 20: mod_base = OTHER; note = uracil
  modified_base 33: mod_base = OTHER; note = uracil
  modified_base 35: mod_base = OTHER; note = uracil
  modified_base 40..41: mod_base = OTHER; note = uracil
  modified_base 47: mod_base = OTHER; note = uracil
  modified_base 55: mod_base = OTHER; note = uracil
  source 1..56: mol_type = other DNA
tctgtacggtgacaaggcgtnnnactnnntgatctcacattgcccctgacaacata

SEQ ID NO: 548 - DNA, 56 bp, synthetic construct
  misc_feature 1..56: note = Synthetic Primer
  misc_difference 21..23: note = n is a, c, g, t or u
  misc_difference 27..29: note = n is a, c, g, t or u
  modified_base 20: mod_base = OTHER; note = uracil
  modified_base 33: mod_base = OTHER; note = uracil
  modified_base 49: mod_base = OTHER; note = uracil
  modified_base 53..55: mod_base = OTHER; note = uracil
  source 1..56: mol_type = other DNA
tctgtacggtgacaaggcgtnnnactnnntgatacaggaagagcacagtcactttg

SEQ ID NO: 549 - DNA, 56 bp, synthetic construct
  misc_feature 1..56: note = Synthetic Primer
  misc_difference 21..23: note = n is a, c, g, t or u
  misc_difference 27..29: note = n is a, c, g, t or u
  modified_base 20: mod_base = OTHER; note = uracil
  modified_base 33..34: mod_base = OTHER; note = uracil
  modified_base 37: mod_base = OTHER; note = uracil
  modified_base 44: mod_base = OTHER; note = uracil
  modified_base 46..47: mod_base = OTHER; note = uracil
  modified_base 49: mod_base = OTHER; note = uracil
  modified_base 52: mod_base = OTHER; note = uracil
  source 1..56: mol_type = other DNA
tctgtacggtgacaaggcgtnnnactnnntgattcctcaaccctcttctcatcagg

SEQ ID NO: 550 - DNA, 56 bp, synthetic construct
  misc_feature 1..56: note = Synthetic Primer
  misc_difference 21..23: note = n is a, c, g, t or u
  misc_difference 27..29: note = n is a, c, g, t or u
  modified_base 20: mod_base = OTHER; note = uracil
  modified_base 33..35: mod_base = OTHER; note = uracil
  modified_base 37..39: mod_base = OTHER; note = uracil
  modified_base 44: mod_base = OTHER; note = uracil
  source 1..56: mol_type = other DNA
tctgtacggtgacaaggcgtnnnactnnntgatttctttgaggtgaagccaaacct

SEQ ID NO: 551 - DNA, 56 bp, synthetic construct
  misc_feature 1..56: note = Synthetic Primer
  misc_difference 21..23: note = n is a, c, g, t or u
  misc_difference 27..29: note = n is a, c, g, t or u
  modified_base 20: mod_base = OTHER; note = uracil
  modified_base 33..34: mod_base = OTHER; note = uracil
  modified_base 39: mod_base = OTHER; note = uracil
  modified_base 43: mod_base = OTHER; note = uracil
  modified_base 50: mod_base = OTHER; note = uracil
  modified_base 53: mod_base = OTHER; note = uracil
  source 1..56: mol_type = other DNA
tctgtacggtgacaaggcgtnnnactnnntgattcccctacctagaccctcctaac

SEQ ID NO: 552 - DNA, 56 bp, synthetic construct
  misc_feature 1..56: note = Synthetic Primer
  misc_difference 21..23: note = n is a, c, g, t or u
  misc_difference 27..29: note = n is a, c, g, t or u
  modified_base 20: mod_base = OTHER; note = uracil
  modified_base 33: mod_base = OTHER; note = uracil
  modified_base 36: mod_base = OTHER; note = uracil
  modified_base 47: mod_base = OTHER; note = uracil
  modified_base 49..51: mod_base = OTHER; note = uracil
  modified_base 54: mod_base = OTHER; note = uracil
  source 1..56: mol_type = other DNA
tctgtacggtgacaaggcgtnnnactnnntgatgctccagaagccctgtttgatag

SEQ ID NO: 553 - DNA, 56 bp, synthetic construct
  misc_feature 1..56: note = Synthetic Primer
  misc_difference 21..23: note = n is a, c, g, t or u
  misc_difference 27..29: note = n is a, c, g, t or u
  modified_base 20: mod_base = OTHER; note = uracil
  modified_base 33..34: mod_base = OTHER; note = uracil
  modified_base 37..38: mod_base = OTHER; note = uracil
  modified_base 41: mod_base = OTHER; note = uracil
  modified_base 43: mod_base = OTHER; note = uracil
  modified_base 45: mod_base = OTHER; note = uracil
  modified_base 48: mod_base = OTHER; note = uracil
  modified_base 50: mod_base = OTHER; note = uracil
  modified_base 55: mod_base = OTHER; note = uracil
  source 1..56: mol_type = other DNA
tctgtacggtgacaaggcgtnnnactnnntgattcattcctgtgtcgtctagcctt

SEQ ID NO: 554 - DNA, 56 bp, synthetic construct
  misc_feature 1..56: note = Synthetic Primer
  misc_difference 21..23: note = n is a, c, g, t or u
  misc_difference 27..29: note = n is a, c, g, t or u
  modified_base 20: mod_base = OTHER; note = uracil
  modified_base 33: mod_base = OTHER; note = uracil
  modified_base 36..37: mod_base = OTHER; note = uracil
  modified_base 39..40: mod_base = OTHER; note = uracil
  modified_base 42: mod_base = OTHER; note = uracil
  modified_base 51: mod_base = OTHER; note = uracil
  modified_base 53: mod_base = OTHER; note = uracil
  source 1..56: mol_type = other DNA
tctgtacggtgacaaggcgtnnnactnnntgatggttattatgaggaagctgtgcc

SEQ ID NO: 555 - DNA, 56 bp, synthetic construct
  misc_feature 1..56: note = Synthetic Primer
  misc_difference 21..23: note = n is a, c, g, t or u
  misc_difference 27..29: note = n is a, c, g, t or u
  modified_base 20: mod_base = OTHER; note = uracil
  modified_base 33: mod_base = OTHER; note = uracil
  modified_base 35..37: mod_base = OTHER; note = uracil
  modified_base 42: mod_base = OTHER; note = uracil
  modified_base 49: mod_base = OTHER; note = uracil
  modified_base 52: mod_base = OTHER; note = uracil
  source 1..56: mol_type = other DNA
tctgtacggtgacaaggcgtnnnactnnntgatctttgaactccaagctgctcaag

SEQ ID NO: 556 - DNA, 56 bp, synthetic construct
  misc_feature 1..56: note = Synthetic Primer
  misc_difference 21..23: note = n is a, c, g, t or u
  misc_difference 27..29: note = n is a, c, g, t or u
  modified_base 20: mod_base = OTHER; note = uracil
  modified_base 33: mod_base = OTHER; note = uracil
  modified_base 37: mod_base = OTHER; note = uracil
  modified_base 40: mod_base = OTHER; note = uracil
  modified_base 45: mod_base = OTHER; note = uracil
  modified_base 47: mod_base = OTHER; note = uracil
  modified_base 49: mod_base = OTHER; note = uracil
  modified_base 51: mod_base = OTHER; note = uracil
  modified_base 53: mod_base = OTHER; note = uracil
  source 1..56: mol_type = other DNA
tctgtacggtgacaaggcgtnnnactnnntgatacgtcatggagtatatgtgtggg

SEQ ID NO: 557 - DNA, 56 bp, synthetic construct
  misc_feature 1..56: note = Synthetic Primer
  misc_difference 21..23: note = n is a, c, g, t or u
  misc_difference 27..29: note = n is a, c, g, t or u
  modified_base 20: mod_base = OTHER; note = uracil
  modified_base 33: mod_base = OTHER; note = uracil
  modified_base 37: mod_base = OTHER; note = uracil
  modified_base 44: mod_base = OTHER; note = uracil
  modified_base 46: mod_base = OTHER; note = uracil
  modified_base 49: mod_base = OTHER; note = uracil
  modified_base 55: mod_base = OTHER; note = uracil
  source 1..56: mol_type = other DNA
tctgtacggtgacaaggcgtnnnactnnntgataactaccacctgtcctacacctg

SEQ ID NO: 558 - DNA, 56 bp, synthetic construct
  misc_feature 1..56: note = Synthetic Primer
  misc_difference 21..23: note = n is a, c, g, t or u
  misc_difference 27..29: note = n is a, c, g, t or u
  modified_base 20: mod_base = OTHER; note = uracil
  modified_base 33: mod_base = OTHER; note = uracil
  modified_base 35..36: mod_base = OTHER; note = uracil
  modified_base 39: mod_base = OTHER; note = uracil
  modified_base 41: mod_base = OTHER; note = uracil
  modified_base 45..46: mod_base = OTHER; note = uracil
  modified_base 53: mod_base = OTHER; note = uracil
  source 1..56: mol_type = other DNA
tctgtacggtgacaaggcgtnnnactnnntgatgttggtatcccttcaggactagg

SEQ ID NO: 559 - DNA, 56 bp, synthetic construct
  misc_feature 1..56: note = Synthetic Primer
  misc_difference 21..23: note = n is a, c, g, t or u
  misc_difference 27..29: note = n is a, c, g, t or u
  modified_base 20: mod_base = OTHER; note = uracil
  modified_base 33: mod_base = OTHER; note = uracil
  modified_base 35: mod_base = OTHER; note = uracil
  modified_base 46: mod_base = OTHER; note = uracil
  modified_base 48: mod_base = OTHER; note = uracil
  modified_base 53: mod_base = OTHER; note = uracil
  source 1..56: mol_type = other DNA
tctgtacggtgacaaggcgtnnnactnnntgatctcagcagacaatatcggatcga

SEQ ID NO: 560 - DNA, 56 bp, synthetic construct
  misc_feature 1..56: note = Synthetic Primer
  misc_difference 21..23: note = n is a, c, g, t or u
  misc_difference 27..29: note = n is a, c, g, t or u
  modified_base 20: mod_base = OTHER; note = uracil
  modified_base 33: mod_base = OTHER; note = uracil
  modified_base 36..37: mod_base = OTHER; note = uracil
  modified_base 46: mod_base = OTHER; note = uracil
  source 1..56: mol_type = other DNA
tctgtacggtgacaaggcgtnnnactnnntgatacttggagaagctgagagaaaac

SEQ ID NO: 561 - DNA, 56 bp, synthetic construct
  misc_feature 1..56: note = Synthetic Primer
  misc_difference 21..23: note = n is a, c, g, t or u
  misc_difference 27..29: note = n is a, c, g, t or u
  modified_base 20: mod_base = OTHER; note = uracil
  modified_base 33..34: mod_base = OTHER; note = uracil
  modified_base 40: mod_base = OTHER; note = uracil
  modified_base 43: mod_base = OTHER; note = uracil
  modified_base 51: mod_base = OTHER; note = uracil
  modified_base 54..55: mod_base = OTHER; note = uracil
  source 1..56: mol_type = other DNA
tctgtacggtgacaaggcgtnnnactnnntgattccaggtcatgaaggagtacttg

SEQ ID NO: 562 - DNA, 56 bp, synthetic construct
  misc_feature 1..56: note = Synthetic Primer
  misc_difference 21..23: note = n is a, c, g, t or u
  misc_difference 27..29: note = n is a, c, g, t or u
  modified_base 20: mod_base = OTHER; note = uracil
  modified_base 33: mod_base = OTHER; note = uracil
  modified_base 38..39: mod_base = OTHER; note = uracil
  modified_base 42: mod_base = OTHER; note = uracil
  modified_base 47: mod_base = OTHER; note = uracil
  modified_base 52: mod_base = OTHER; note = uracil
  modified_base 54: mod_base = OTHER; note = uracil
  source 1..56: mol_type = other DNA
tctgtacggtgacaaggcgtnnnactnnntgatgaccttcatgagctgcaatctca

SEQ ID NO: 563 - DNA, 56 bp, synthetic construct
  misc_feature 1..56: note = Synthetic Primer
  misc_difference 21..23: note = n is a, c, g, t or u
  misc_difference 27..29: note = n is a, c, g, t or u
  modified_base 20: mod_base = OTHER; note = uracil
  modified_base 33..34: mod_base = OTHER; note = uracil
  modified_base 36..38: mod_base = OTHER; note = uracil
  modified_base 42: mod_base = OTHER; note = uracil
  modified_base 44: mod_base = OTHER; note = uracil
  modified_base 48: mod_base = OTHER; note = uracil
  modified_base 51: mod_base = OTHER; note = uracil
  source 1..56: mol_type = other DNA
tctgtacggtgacaaggcgtnnnactnnntgattgtttcagtatccctgctccaaa

SEQ ID NO: 564 - DNA, 56 bp, synthetic construct
  misc_feature 1..56: note = Synthetic Primer
  misc_difference 21..23: note = n is a, c, g, t or u
  misc_difference 27..29: note = n is a, c, g, t or u
  modified_base 20: mod_base = OTHER; note = uracil
  modified_base 33: mod_base = OTHER; note = uracil
  modified_base 38: mod_base = OTHER; note = uracil
  modified_base 40: mod_base = OTHER; note = uracil
  modified_base 43: mod_base = OTHER; note = uracil
  modified_base 46: mod_base = OTHER; note = uracil
  source 1..56: mol_type = other DNA
tctgtacggtgacaaggcgtnnnactnnntgataagatgtcatcatcaaccaagca

SEQ ID NO: 565 - DNA, 56 bp, synthetic construct
  misc_feature 1..56: note = Synthetic Primer
  misc_difference 21..23: note = n is a, c, g, t or u
  misc_difference 27..29: note = n is a, c, g, t or u
  modified_base 20: mod_base = OTHER; note = uracil
  modified_base 33: mod_base = OTHER; note = uracil
  modified_base 36: mod_base = OTHER; note = uracil
  modified_base 40: mod_base = OTHER; note = uracil
  modified_base 42..43: mod_base = OTHER; note = uracil
  modified_base 45..46: mod_base = OTHER; note = uracil
  modified_base 52: mod_base = OTHER; note = uracil
  modified_base 55: mod_base = OTHER; note = uracil
  source 1..56: mol_type = other DNA
tctgtacggtgacaaggcgtnnnactnnntgatactccatgttcttggccatgcta

SEQ ID NO: 566 - DNA, 56 bp, synthetic construct
  misc_feature 1..56: note = Synthetic Primer
  misc_difference 21..23: note = n is a, c, g, t or u
  misc_difference 27..29: note = n is a, c, g, t or u
  modified_base 20: mod_base = OTHER; note = uracil
  modified_base 33: mod_base = OTHER; note = uracil
  modified_base 39: mod_base = OTHER; note = uracil
  modified_base 42..43: mod_base = OTHER; note = uracil
  modified_base 48: mod_base = OTHER; note = uracil
  modified_base 51: mod_base = OTHER; note = uracil
  source 1..56: mol_type = other DNA
tctgtacggtgacaaggcgtnnnactnnntgatggagctggttcacatgatcaact

SEQ ID NO: 567 - DNA, 56 bp, synthetic construct
  misc_feature 1..56: note = Synthetic Primer
  misc_difference 21..23: note = n is a, c, g, t or u
  misc_difference 27..29: note = n is a, c, g, t or u
  modified_base 20: mod_base = OTHER; note = uracil
  modified_base 33: mod_base = OTHER; note = uracil
  modified_base 35: mod_base = OTHER; note = uracil
  modified_base 37..39: mod_base = OTHER; note = uracil
  modified_base 41..42: mod_base = OTHER; note = uracil
  modified_base 50: mod_base = OTHER; note = uracil
  modified_base 52: mod_base = OTHER; note = uracil
  modified_base 54: mod_base = OTHER; note = uracil
  source 1..56: mol_type = other DNA
tctgtacggtgacaaggcgtnnnactnnntgatatatttcttccgcaagtgtgtcc

SEQ ID NO: 568 - DNA, 56 bp, synthetic construct
  misc_feature 1..56: note = Synthetic Primer
  misc_difference 21..23: note = n is a, c, g, t or u
  misc_difference 27..29: note = n is a, c, g, t or u
  modified_base 20: mod_base = OTHER; note = uracil
  modified_base 33: mod_base = OTHER; note = uracil
  modified_base 38: mod_base = OTHER; note = uracil
  modified_base 44: mod_base = OTHER; note = uracil
  modified_base 47..49: mod_base = OTHER; note = uracil
  modified_base 51: mod_base = OTHER; note = uracil
  modified_base 54: mod_base = OTHER; note = uracil
  source 1..56: mol_type = other DNA
tctgtacggtgacaaggcgtnnnactnnntgataaactcgaactgatttctcctgg

SEQ ID NO: 569 - DNA, 56 bp, synthetic construct
  misc_feature 1..56: note = Synthetic Primer
  misc_difference 21..23: note = n is a, c, g, t or u
  misc_difference 27..29: note = n is a, c, g, t or u
  modified_base 20: mod_base = OTHER; note = uracil
  modified_base 33: mod_base = OTHER; note = uracil
  modified_base 39: mod_base = OTHER; note = uracil
  modified_base 41: mod_base = OTHER; note = uracil
  source 1..56: mol_type = other DNA
tctgtacggtgacaaggcgtnnnactnnntgatggcgctgtcaacagaaagaaaaa

SEQ ID NO: 570 - DNA, 56 bp, synthetic construct
  misc_feature 1..56: note = Synthetic Primer
  misc_difference 21..23: note = n is a, c, g, t or u
  misc_difference 27..29: note = n is a, c, g, t or u
  modified_base 20: mod_base = OTHER; note = uracil
  modified_base 33: mod_base = OTHER; note = uracil
  modified_base 40..41: mod_base = OTHER; note = uracil
  modified_base 49..50: mod_base = OTHER; note = uracil
  modified_base 53: mod_base = OTHER; note = uracil
  source 1..56: mol_type = other DNA
tctgtacggtgacaaggcgtnnnactnnntgatccaacgttcaagcagttggtaga

SEQ ID NO: 571 - DNA, 56 bp, synthetic construct
  misc_feature 1..56: note = Synthetic Primer
  misc_difference 21..23: note = n is a, c, g, t or u
  misc_difference 27..29: note = n is a, c, g, t or u
  modified_base 20: mod_base = OTHER; note = uracil
  modified_base 33..34: mod_base = OTHER; note = uracil
  modified_base 48..49: mod_base = OTHER; note = uracil
  modified_base 55: mod_base = OTHER; note = uracil
  source 1..56: mol_type = other DNA
tctgtacggtgacaaggcgtnnnactnnntgattaaccaagaggaagttggaggtg

SEQ ID NO: 572 - DNA, 56 bp, synthetic construct
  misc_feature 1..56: note = Synthetic Primer
  misc_difference 21..23: note = n is a, c, g, t or u
  misc_difference 27..29: note = n is a, c, g, t or u
  modified_base 20: mod_base = OTHER; note = uracil
  modified_base 33: mod_base = OTHER; note = uracil
  modified_base 36: mod_base = OTHER; note = uracil
  modified_base 45: mod_base = OTHER; note = uracil
  modified_base 47..49: mod_base = OTHER; note = uracil
  modified_base 52: mod_base = OTHER; note = uracil
  modified_base 54..55: mod_base = OTHER; note = uracil
  source 1..56: mol_type = other DNA
tctgtacggtgacaaggcgtnnnactnnntgatggtagaggaggtgtttgatgttc

SEQ ID NO: 573 - DNA, 56 bp, synthetic construct
  misc_feature 1..56: note = Synthetic Primer
  misc_difference 21..23: note = n is a, c, g, t or u
  misc_difference 27..29: note = n is a, c, g, t or u
  modified_base 20: mod_base = OTHER; note = uracil
  modified_base 33: mod_base = OTHER; note = uracil
  modified_base 36: mod_base = OTHER; note = uracil
  modified_base 39: mod_base = OTHER; note = uracil
  modified_base 42..43: mod_base = OTHER; note = uracil
  modified_base 46..47: mod_base = OTHER; note = uracil
  source 1..56: mol_type = other DNA
tctgtacggtgacaaggcgtnnnactnnntgatgatcctccttgcttaccacacac

SEQ ID NO: 574 - DNA, 56 bp, synthetic construct
  misc_feature 1..56: note = Synthetic Primer
  misc_difference 21..23: note = n is a, c, g, t or u
  misc_difference 27..29: note = n is a, c, g, t or u
  modified_base 20: mod_base = OTHER; note = uracil
  modified_base 33: mod_base = OTHER; note = uracil
  modified_base 38..39: mod_base = OTHER; note = uracil
  modified_base 50..52: mod_base = OTHER; note = uracil
  source 1..56: mol_type = other DNA
tctgtacggtgacaaggcgtnnnactnnntgatgcccttcgagagcaagtttaaga

SEQ ID NO: 575 - DNA, 56 bp, synthetic construct
  misc_feature 1..56: note = Synthetic Primer
  misc_difference 21..23: note = n is a, c, g, t or u
  misc_difference 27..29: note = n is a, c, g, t or u
  modified_base 20: mod_base = OTHER; note = uracil
  modified_base 33: mod_base = OTHER; note = uracil
  modified_base 38: mod_base = OTHER; note = uracil
  modified_base 42: mod_base = OTHER; note = uracil
  modified_base 44..45: mod_base = OTHER; note = uracil
  modified_base 50: mod_base = OTHER; note = uracil
  modified_base 54: mod_base = OTHER; note = uracil
  source 1..56: mol_type = other DNA
tctgtacggtgacaaggcgtnnnactnnntgatcaagtgactcttcagatccctgc

SEQ ID NO: 576 - DNA, 56 bp, synthetic construct
  misc_feature 1..56: note = Synthetic Primer
  misc_difference 21..23: note = n is a, c, g, t or u
  misc_difference 27..29: note = n is a, c, g, t or u
  modified_base 20: mod_base = OTHER; note = uracil
  modified_base 33: mod_base = OTHER; note = uracil
  modified_base 37: mod_base = OTHER; note = uracil
  modified_base 47..49: mod_base = OTHER; note = uracil
  modified_base 52..53: mod_base = OTHER; note = uracil
  modified_base 55: mod_base = OTHER; note = uracil
  source 1..56: mol_type = other DNA
tctgtacggtgacaaggcgtnnnactnnntgatacatgaaagggagtttggttctg

SEQ ID NO: 577 - DNA, 56 bp, synthetic construct
  misc_feature 1..56: note = Synthetic Primer
  misc_difference 21..23: note = n is a, c, g, t or u
  misc_difference 27..29: note = n is a, c, g, t or u
  modified_base 20: mod_base = OTHER; note = uracil
  modified_base 33..34: mod_base = OTHER; note = uracil
  modified_base 37: mod_base = OTHER; note = uracil
  modified_base 53: mod_base = OTHER; note = uracil
  source 1..56: mol_type = other DNA
tctgtacggtgacaaggcgtnnnactnnntgattgctaaaagagagggagagtgat

SEQ ID NO: 578 - DNA, 56 bp, synthetic construct
  misc_feature 1..56: note = Synthetic Primer
  misc_difference 21..23: note = n is a, c, g, t or u
  misc_difference 27..29: note = n is a, c, g, t or u
  modified_base 20: mod_base = OTHER; note = uracil
  modified_base 33: mod_base = OTHER; note = uracil
  modified_base 42: mod_base = OTHER; note = uracil
  modified_base 47..48: mod_base = OTHER; note = uracil
  source 1..56: mol_type = other DNA
tctgtacggtgacaaggcgtnnnactnnntgatggaggaactggacttccagaaga

SEQ ID NO: 579 - DNA, 56 bp, synthetic construct
  misc_feature 1..56: note = Synthetic Primer
  misc_difference 21..23: note = n is a, c, g, t or u
  misc_difference 27..29: note = n is a, c, g, t or u
  modified_base 20: mod_base = OTHER; note = uracil
  modified_base 33..34: mod_base = OTHER; note = uracil
  modified_base 39: mod_base = OTHER; note = uracil
  modified_base 41..42: mod_base = OTHER; note = uracil
  modified_base 45: mod_base = OTHER; note = uracil
  modified_base 50: mod_base = OTHER; note = uracil
  modified_base 54..55: mod_base = OTHER; note = uracil
  source 1..56: mol_type = other DNA
tctgtacggtgacaaggcgtnnnactnnntgattgggatcttcgtagcatcagttg

SEQ ID NO: 580 - DNA, 56 bp, synthetic construct
  misc_feature 1..56: note = Synthetic Primer
  misc_difference 21..23: note = n is a, c, g, t or u
  misc_difference 27..29: note = n is a, c, g, t or u
  modified_base 20: mod_base = OTHER; note = uracil
  modified_base 33: mod_base = OTHER; note = uracil
  modified_base 43: mod_base = OTHER; note = uracil
  modified_base 53: mod_base = OTHER; note = uracil
  source 1..56: mol_type = other DNA
tctgtacggtgacaaggcgtnnnactnnntgatgcagaaccatccaccaacataag

SEQ ID NO: 581 - DNA, 56 bp, synthetic construct
  misc_feature 1..56: note = Synthetic Primer
  misc_difference 21..23: note = n is a, c, g, t or u
  misc_difference 27..29: note = n is a, c, g, t or u
  modified_base 20: mod_base = OTHER; note = uracil
  modified_base 33: mod_base = OTHER; note = uracil
  modified_base 38..39: mod_base = OTHER; note = uracil
  modified_base 43: mod_base = OTHER; note = uracil
  modified_base 48: mod_base = OTHER; note = uracil
  modified_base 53: mod_base = OTHER; note = uracil
  source 1..56: mol_type = other DNA
tctgtacggtgacaaggcgtnnnactnnntgatagagttaaatgccctcaagtcga

SEQ ID NO: 582 - DNA, 56 bp, synthetic construct
  misc_feature 1..56: note = Synthetic Primer
  misc_difference 21..23: note = n is a, c, g, t or u
  misc_difference 27..29: note = n is a, c, g, t or u
  modified_base 20: mod_base = OTHER; note = uracil
  modified_base 33..34: mod_base = OTHER; note = uracil
  modified_base 38..42: mod_base = OTHER; note = uracil
  modified_base 45: mod_base = OTHER; note = uracil
  modified_base 47: mod_base = OTHER; note = uracil
  modified_base 51: mod_base = OTHER; note = uracil
  source 1..56: mol_type = other DNA
tctgtacggtgacaaggcgtnnnactnnntgattgggtttttcctgtggctgaaaa

SEQ ID NO: 583 - DNA, 56 bp, synthetic construct
  misc_feature 1..56: note = Synthetic Primer
  misc_difference 21..23: note = n is a, c, g, t or u
  misc_difference 27..29: note = n is a, c, g, t or u
  modified_base 20: mod_base = OTHER; note = uracil
  modified_base 33: mod_base = OTHER; note = uracil
  modified_base 39: mod_base = OTHER; note = uracil
  modified_base 43: mod_base = OTHER; note = uracil
  modified_base 47: mod_base = OTHER; note = uracil
  modified_base 50: mod_base = OTHER; note = uracil
  modified_base 52..53: mod_base = OTHER; note = uracil
  source 1..56: mol_type = other DNA
tctgtacggtgacaaggcgtnnnactnnntgataggactgggtgaatgctattgag

SEQ ID NO: 584 - DNA, 56 bp, synthetic construct
  misc_feature 1..56: note = Synthetic Primer
  misc_difference 21..23: note = n is a, c, g, t or u
  misc_difference 27..29: note = n is a, c, g, t or u
  modified_base 20: mod_base = OTHER; note = uracil
  modified_base 33: mod_base = OTHER; note = uracil
  modified_base 42: mod_base = OTHER; note = uracil
  modified_base 51: mod_base = OTHER; note = uracil
  source 1..56: mol_type = other DNA
tctgtacggtgacaaggcgtnnnactnnntgataccagggatgagcagaatgaaga

SEQ ID NO: 585 - DNA, 56 bp, synthetic construct
  misc_feature 1..56: note = Synthetic Primer
  misc_difference 21..23: note = n is a, c, g, t or u
  misc_difference 27..29: note = n is a, c, g, t or u
  modified_base 20: mod_base = OTHER; note = uracil
  modified_base 33: mod_base = OTHER; note = uracil
  modified_base 41: mod_base = OTHER; note = uracil
  modified_base 45: mod_base = OTHER; note = uracil
  modified_base 50: mod_base = OTHER; note = uracil
  source 1..56: mol_type = other DNA
tctgtacggtgacaaggcgtnnnactnnntgataagacggtccgtaaactgaaaaa

SEQ ID NO: 586 - DNA, 56 bp, synthetic construct
  misc_feature 1..56: note = Synthetic Primer
  misc_difference 21..23: note = n is a, c, g, t or u
  misc_difference 27..29: note = n is a, c, g, t or u
  modified_base 20: mod_base = OTHER; note = uracil
  modified_base 33: mod_base = OTHER; note = uracil
  modified_base 40: mod_base = OTHER; note = uracil
  modified_base 42: mod_base = OTHER; note = uracil
  modified_base 44: mod_base = OTHER; note = uracil
  source 1..56: mol_type = other DNA
tctgtacggtgacaaggcgtnnnactnnntgatcagggatatatcccccaaaggat

SEQ ID NO: 587 - DNA, 56 bp, synthetic construct
  misc_feature 1..56: note = Synthetic Primer
  misc_difference 21..23: note = n is a, c, g, t or u
  misc_difference 27..29: note = n is a, c, g, t or u
  modified_base 20: mod_base = OTHER; note = uracil
  modified_base 33: mod_base = OTHER; note = uracil
  modified_base 36..37: mod_base = OTHER; note = uracil
  modified_base 39..40: mod_base = OTHER; note = uracil
  modified_base 48..49: mod_base = OTHER; note = uracil
  source 1..56: mol_type = other DNA
tctgtacggtgacaaggcgtnnnactnnntgatggttattaaggagcttcgcaagg

SEQ ID NO: 588 - DNA, 56 bp, synthetic construct
  misc_feature 1..56: note = Synthetic Primer
  misc_difference 21..23: note = n is a, c, g, t or u
  misc_difference 27..29: note = n is a, c, g, t or u
  modified_base 20: mod_base = OTHER; note = uracil
  modified_base 33: mod_base = OTHER; note = uracil
  modified_base 37: mod_base = OTHER; note = uracil
  modified_base 39: mod_base = OTHER; note = uracil
  modified_base 47: mod_base = OTHER; note = uracil
  modified_base 49: mod_base = OTHER; note = uracil
  modified_base 51: mod_base = OTHER; note = uracil
  source 1..56: mol_type = other DNA
tctgtacggtgacaaggcgtnnnactnnntgatgcatgtccagagatgtctacagc

SEQ ID NO: 589 - DNA, 56 bp, synthetic construct
  misc_feature 1..56: note = Synthetic Primer
  misc_difference 21..23: note = n is a, c, g, t or u
  misc_difference 27..29: note = n is a, c, g, t or u
  modified_base 20: mod_base = OTHER; note = uracil
  modified_base 33: mod_base = OTHER; note = uracil
  modified_base 38: mod_base = OTHER; note = uracil
  modified_base 40..42: mod_base = OTHER; note = uracil
  modified_base 49: mod_base = OTHER; note = uracil
  source 1..56: mol_type = other DNA
tctgtacggtgacaaggcgtnnnactnnntgatgccgtatttgaagcctcaggaac

SEQ ID NO: 590 - DNA, 56 bp, synthetic construct
  misc_feature 1..56: note = Synthetic Primer
  misc_difference 21..23: note = n is a, c, g, t or u
  misc_difference 27..29: note = n is a, c, g, t or u
  modified_base 20: mod_base = OTHER; note = uracil
  modified_base 33..34: mod_base = OTHER; note = uracil
  modified_base 42: mod_base = OTHER; note = uracil
  modified_base 50: mod_base = OTHER; note = uracil
  source 1..56: mol_type = other DNA
tctgtacggtgacaaggcgtnnnactnnntgattccagaagtccagagctgagaag

SEQ ID NO: 591 - DNA, 56 bp, synthetic construct
  misc_feature 1..56: note = Synthetic Primer
  misc_difference 21..23: note = n is a, c, g, t or u
  misc_difference 27..29: note = n is a, c, g, t or u
  modified_base 20: mod_base = OTHER; note = uracil
  modified_base 33: mod_base = OTHER; note = uracil
  modified_base 35: mod_base = OTHER; note = uracil
  modified_base 41: mod_base = OTHER; note = uracil
  modified_base 43..44: mod_base = OTHER; note = uracil
  modified_base 46: mod_base = OTHER; note = uracil
  modified_base 50: mod_base = OTHER; note = uracil
  modified_base 54..55: mod_base = OTHER; note = uracil
  source 1..56: mol_type = other DNA
tctgtacggtgacaaggcgtnnnactnnntgatctagacatcttctccctcccttg

SEQ ID NO: 592 - DNA, 56 bp, synthetic construct
  misc_feature 1..56: note = Synthetic Primer
  misc_difference 21..23: note = n is a, c, g, t or u
  misc_difference 27..29: note = n is a, c, g, t or u
  modified_base 20: mod_base = OTHER; note = uracil
  modified_base 33..34: mod_base = OTHER; note = uracil
  modified_base 36: mod_base = OTHER; note = uracil
  modified_base 49: mod_base = OTHER; note = uracil
  modified_base 51: mod_base = OTHER; note = uracil
  modified_base 54..55: mod_base = OTHER; note = uracil
  source 1..56: mol_type = other DNA
tctgtacggtgacaaggcgtnnnactnnntgattatcgcaggagagactgtgattc

SEQ ID NO: 593 - DNA, 56 bp, synthetic construct
  misc_feature 1..56: note = Synthetic Primer
  misc_difference 21..23: note = n is a, c, g, t or u
  misc_difference 27..29: note = n is a, c, g, t or u
  modified_base 20: mod_base = OTHER; note = uracil
  modified_base 33: mod_base = OTHER; note = uracil
  modified_base 41: mod_base = OTHER; note = uracil
  modified_base 45: mod_base = OTHER; note = uracil
  modified_base 50..52: mod_base = OTHER; note = uracil
  modified_base 55: mod_base = OTHER; note = uracil
  source 1..56: mol_type = other DNA
tctgtacggtgacaaggcgtnnnactnnntgatcagcagatgaatcacctttcgtt

SEQ ID NO: 594 - DNA, 56 bp, synthetic construct
  misc_feature 1..56: note = Synthetic Primer
  misc_difference 21..23: note = n is a, c, g, t or u
  misc_difference 27..29: note = n is a, c, g, t or u
  modified_base 20: mod_base = OTHER; note = uracil
  modified_base 33: mod_base = OTHER; note = uracil
  modified_base 35: mod_base = OTHER; note = uracil
  modified_base 41: mod_base = OTHER; note = uracil
  modified_base 44: mod_base = OTHER; note = uracil
  modified_base 52..55: mod_base = OTHER; note = uracil
  source 1..56: mol_type = other DNA
tctgtacggtgacaaggcgtnnnactnnntgatctgaggatgctcaaagggttttt

SEQ ID NO: 595 - DNA, 56 bp, synthetic construct
  misc_feature 1..56: note = Synthetic Primer
  misc_difference 21..23: note = n is a, c, g, t or u
  misc_difference 27..29: note = n is a, c, g, t or u
  modified_base 20: mod_base = OTHER; note = uracil
  modified_base 33: mod_base = OTHER; note = uracil
  modified_base 38: mod_base = OTHER; note = uracil
  modified_base 41: mod_base = OTHER; note = uracil
  modified_base 48..50: mod_base = OTHER; note = uracil
  modified_base 53: mod_base = OTHER; note = uracil
  source 1..56: mol_type = other DNA
tctgtacggtgacaaggcgtnnnactnnntgataggctcctgagacctttgataac

SEQ ID NO: 596 - DNA, 56 bp, synthetic construct
  misc_feature 1..56: note = Synthetic Primer
  misc_difference 21..23: note = n is a, c, g, t or u
  misc_difference 27..29: note = n is a, c, g, t or u
  modified_base 20: mod_base = OTHER; note = uracil
  modified_base 33: mod_base = OTHER; note = uracil
  modified_base 37: mod_base = OTHER; note = uracil
  modified_base 48: mod_base = OTHER; note = uracil
  modified_base 52: mod_base = OTHER; note = uracil
  source 1..56: mol_type = other DNA
tctgtacggtgacaaggcgtnnnactnnntgatggatgagcaagacctaaatgagc

SEQ ID NO: 597 - DNA, 56 bp, synthetic construct
  misc_feature 1..56: note = Synthetic Primer
  misc_difference 21..23: note = n is a, c, g, t or u
  misc_difference 27..29: note = n is a, c, g, t or u
  modified_base 20: mod_base = OTHER; note = uracil
  modified_base 33: mod_base = OTHER; note = uracil
  modified_base 35: mod_base = OTHER; note = uracil
  modified_base 37..38: mod_base = OTHER; note = uracil
  modified_base 40: mod_base = OTHER; note = uracil
  modified_base 51: mod_base = OTHER; note = uracil
  modified_base 53..54: mod_base = OTHER; note = uracil
  source 1..56: mol_type = other DNA
tctgtacggtgacaaggcgtnnnactnnntgatctattgtaagcaggcgatgttgt

SEQ ID NO: 598 - DNA, 56 bp, synthetic construct
  misc_feature 1..56: note = Synthetic Primer
  misc_difference 21..23: note = n is a, c, g, t or u
  misc_difference 27..29: note = n is a, c, g, t or u
  modified_base 20: mod_base = OTHER; note = uracil
  modified_base 33: mod_base = OTHER; note = uracil
  modified_base 36..37: mod_base = OTHER; note = uracil
  modified_base 41: mod_base = OTHER; note = uracil
  modified_base 43..44: mod_base = OTHER; note = uracil
  source 1..56: mol_type = other DNA
tctgtacggtgacaaggcgtnnnactnnntgatccttagctgttgaaggaaaacga

SEQ ID NO: 599 - DNA, 56 bp, synthetic construct
  misc_feature 1..56: note = Synthetic Primer
  misc_difference 21..23: note = n is a, c, g, t or u
  misc_difference 27..29: note = n is a, c, g, t or u
  modified_base 20: mod_base = OTHER; note = uracil
  modified_base 33..34: mod_base = OTHER; note = uracil
  modified_base 38..40: mod_base = OTHER; note = uracil
  modified_base 43: mod_base = OTHER; note = uracil
  modified_base 52..53: mod_base = OTHER; note = uracil
  source 1..56: mol_type = other DNA
tctgtacggtgacaaggcgtnnnactnnntgattgaatttcctgaagaacgttggg

SEQ ID NO: 600 - DNA, 56 bp, synthetic construct
  misc_feature 1..56: note = Synthetic Primer
  misc_difference 21..23: note = n is a, c, g, t or u
  misc_difference 27..29: note = n is a, c, g, t or u
  modified_base 20: mod_base = OTHER; note = uracil
  modified_base 33..34: mod_base = OTHER; note = uracil
  modified_base 38: mod_base = OTHER; note = uracil
  modified_base 45: mod_base = OTHER; note = uracil
  modified_base 50: mod_base = OTHER; note = uracil
  modified_base 52..53: mod_base = OTHER; note = uracil
  source 1..56: mol_type = other DNA
tctgtacggtgacaaggcgtnnnactnnntgattacgtgaaggatgacatcttccg

SEQ ID NO: 601 - DNA, 56 bp, synthetic construct
  misc_feature 1..56: note = Synthetic Primer
  misc_difference 21..23: note = n is a, c, g, t or u
  misc_difference 27..29: note = n is a, c, g, t or u
  modified_base 20: mod_base = OTHER; note = uracil
  modified_base 33: mod_base = OTHER; note = uracil
  modified_base 35: mod_base = OTHER; note = uracil
  modified_base 39..41: mod_base = OTHER; note = uracil
  modified_base 47: mod_base = OTHER; note = uracil
  source 1..56: mol_type = other DNA
tctgtacggtgacaaggcgtnnnactnnntgatgtgcctttgaaaatcaacgacaa

SEQ ID NO: 602 - DNA, 56 bp, synthetic construct
  misc_feature 1..56: note = Synthetic Primer
  misc_difference 21..23: note = n is a, c, g, t or u
  misc_difference 27..29: note = n is a, c, g, t or u
  modified_base 20: mod_base = OTHER; note = uracil
  modified_base 33: mod_base = OTHER; note = uracil
  modified_base 38: mod_base = OTHER; note = uracil
  modified_base 47..48: mod_base = OTHER; note = uracil
  modified_base 53..54: mod_base = OTHER; note = uracil
  source 1..56: mol_type = other DNA
tctgtacggtgacaaggcgtnnnactnnntgatgacctaaagaccattgcacttcg

SEQ ID NO: 603 - DNA, 56 bp, synthetic construct
  misc_feature 1..56: note = Synthetic Primer
  misc_difference 21..23: note = n is a, c, g, t or u
  misc_difference 27..29: note = n is a, c, g, t or u
  modified_base 20: mod_base = OTHER; note = uracil
  modified_base 33: mod_base = OTHER; note = uracil
  modified_base 35..36: mod_base = OTHER; note = uracil
  modified_base 38: mod_base = OTHER; note = uracil
  modified_base 55: mod_base = OTHER; note = uracil
  source 1..56: mol_type = other DNA
tctgtacggtgacaaggcgtnnnactnnntgatcttgtcagggaacaggaagaatt

SEQ ID NO: 604 - DNA, 56 bp, synthetic construct
  misc_feature 1..56: note = Synthetic Primer
  misc_difference 21..23: note = n is a, c, g, t or u
  misc_difference 27..29: note = n is a, c, g, t or u
  modified_base 20: mod_base = OTHER; note = uracil
  modified_base 33: mod_base = OTHER; note = uracil
  modified_base 36: mod_base = OTHER; note = uracil
  modified_base 42..44: mod_base = OTHER; note = uracil
  modified_base 47: mod_base = OTHER; note = uracil
  modified_base 54: mod_base = OTHER; note = uracil
  source 1..56: mol_type = other DNA
tctgtacggtgacaaggcgtnnnactnnntgataataaaactttgctgccacctgt

SEQ ID NO: 605 - DNA, 56 bp, synthetic construct
  misc_feature 1..56: note = Synthetic Primer
  misc_difference 21..23: note = n is a, c, g, t or u
  misc_difference 27..29: note = n is a, c, g, t or u
  modified_base 20: mod_base = OTHER; note = uracil
  modified_base 33: mod_base = OTHER; note = uracil
  modified_base 45..46: mod_base = OTHER; note = uracil
  modified_base 51..52: mod_base = OTHER; note = uracil
  source 1..56: mol_type = other DNA
tctgtacggtgacaaggcgtnnnactnnntgataacaacaggagttgccattccat

SEQ ID NO: 606 - DNA, 56 bp, synthetic construct
  misc_feature 1..56: note = Synthetic Primer
  misc_difference 21..23: note = n is a, c, g, t or u
  misc_difference 27..29: note = n is a, c, g, t or u
  modified_base 20: mod_base = OTHER; note = uracil
  modified_base 33: mod_base = OTHER; note = uracil
  modified_base 35: mod_base = OTHER; note = uracil
  modified_base 38: mod_base = OTHER; note = uracil
  modified_base 41: mod_base = OTHER; note = uracil
  modified_base 44..46: mod_base = OTHER; note = uracil
  modified_base 48: mod_base = OTHER; note = uracil
  modified_base 53: mod_base = OTHER; note = uracil
  source 1..56: mol_type = other DNA
tctgtacggtgacaaggcgtnnnactnnntgatgtgatcctagtttctgggctcaa

SEQ ID NO: 607 - DNA, 56 bp, synthetic construct
  misc_feature 1..56: note = Synthetic Primer
  misc_difference 21..23: note = n is a, c, g, t or u
  misc_difference 27..29: note = n is a, c, g, t or u
  modified_base 20: mod_base = OTHER; note = uracil
  modified_base 33: mod_base = OTHER; note = uracil
  modified_base 35: mod_base = OTHER; note = uracil
  modified_base 51: mod_base = OTHER; note = uracil
  source 1..56: mol_type = other DNA
tctgtacggtgacaaggcgtnnnactnnntgatatcaggaagaggaagagtccaca

SEQ ID NO: 608 - DNA, 56 bp, synthetic construct
  misc_feature 1..56: note = Synthetic Primer
  misc_difference 21..23: note = n is a, c, g, t or u
  misc_difference 27..29: note = n is a, c, g, t or u
  modified_base 20: mod_base = OTHER; note = uracil
  modified_base 33: mod_base = OTHER; note = uracil
  modified_base 44: mod_base = OTHER; note = uracil
  modified_base 49: mod_base = OTHER; note = uracil
  modified_base 54..55: mod_base = OTHER; note = uracil
  source 1..56: mol_type = other DNA
tctgtacggtgacaaggcgtnnnactnnntgataaagagggactgccataacattc

SEQ ID NO: 609 - DNA, 56 bp, synthetic construct
  misc_feature 1..56: note = Synthetic Primer
  misc_difference 21..23: note = n is a, c, g, t or u
  misc_difference 27..29: note = n is a, c, g, t or u
  modified_base 20: mod_base = OTHER; note = uracil
  modified_base 33: mod_base = OTHER; note = uracil
  modified_base 36: mod_base = OTHER; note = uracil
  modified_base 40..41: mod_base = OTHER; note = uracil
  modified_base 43: mod_base = OTHER; note = uracil
  modified_base 50: mod_base = OTHER; note = uracil
  modified_base 55: mod_base = OTHER; note = uracil
  source 1..56: mol_type = other DNA
tctgtacggtgacaaggcgtnnnactnnntgatactgccttctgaaaggtggaatc

SEQ ID NO: 610 - DNA, 56 bp, synthetic construct
  misc_feature 1..56: note = Synthetic Primer
  misc_difference 21..23: note = n is a, c, g, t or u
  misc_difference 27..29: note = n is a, c, g, t or u
  modified_base 20: mod_base = OTHER; note = uracil
  modified_base 33: mod_base = OTHER; note = uracil
  modified_base 35: mod_base = OTHER; note = uracil
  modified_base 41..42: mod_base = OTHER; note = uracil
  source 1..56: mol_type = other DNA
tctgtacggtgacaaggcgtnnnactnnntgatgtgggaattgacaaagacaagcc

SEQ ID NO: 611 - DNA, 56 bp, synthetic construct
  misc_feature 1..56: note = Synthetic Primer
  misc_difference 21..23: note = n is a, c, g, t or u
  misc_difference 27..29: note = n is a, c, g, t or u
  modified_base 20: mod_base = OTHER; note = uracil
  modified_base 33: mod_base = OTHER; note = uracil
  modified_base 46: mod_base = OTHER; note = uracil
  modified_base 52: mod_base = OTHER; note = uracil
  modified_base 55: mod_base = OTHER; note = uracil
  source 1..56: mol_type = other DNA
tctgtacggtgacaaggcgtnnnactnnntgatacagcccaaagatgagagtgatt

SEQ ID NO: 612 - DNA, 56 bp, synthetic construct
  misc_feature 1..56: note = Synthetic Primer
  misc_difference 21..23: note = n is a, c, g, t or u
  misc_difference 27..29: note = n is a, c, g, t or u
  modified_base 20: mod_base = OTHER; note = uracil
  modified_base 33: mod_base = OTHER; note = uracil
  modified_base 36..38: mod_base = OTHER; note = uracil
  modified_base 46: mod_base = OTHER; note = uracil
  modified_base 53..55: mod_base = OTHER; note = uracil
  source 1..56: mol_type = other DNA
tctgtacggtgacaaggcgtnnnactnnntgatggtttcagacgctgaaggatttt

SEQ ID NO: 613 - DNA, 56 bp, synthetic construct
  misc_feature 1..56: note = Synthetic Primer
  misc_difference 21..23: note = n is a, c, g, t or u
  misc_difference 27..29: note = n is a, c, g, t or u
  modified_base 20: mod_base = OTHER; note = uracil
  modified_base 33..34: mod_base = OTHER; note = uracil
  modified_base 37: mod_base = OTHER; note = uracil
  modified_base 39: mod_base = OTHER; note = uracil
  modified_base 44: mod_base = OTHER; note = uracil
  modified_base 48: mod_base = OTHER; note = uracil
  modified_base 51: mod_base = OTHER; note = uracil
  modified_base 55: mod_base = OTHER; note = uracil
  source 1..56: mol_type = other DNA
tctgtacggtgacaaggcgtnnnactnnntgattgatgtggactggatagtcactg

SEQ ID NO: 614 - DNA, 57 bp, synthetic construct
  misc_feature 1..57: note = Synthetic Primer
  misc_difference 21..23: note = n is a, c, g, t or u
  misc_difference 27..29: note = n is a, c, g, t or u
  modified_base 20: mod_base = OTHER; note = uracil
  modified_base 33: mod_base = OTHER; note = uracil
  modified_base 35: mod_base = OTHER; note = uracil
  modified_base 37: mod_base = OTHER; note = uracil
  modified_base 39..40: mod_base = OTHER; note = uracil
  modified_base 42: mod_base = OTHER; note = uracil
  modified_base 46: mod_base = OTHER; note = uracil
  modified_base 48: mod_base = OTHER; note = uracil
  modified_base 50: mod_base = OTHER; note = uracil
  modified_base 54: mod_base = OTHER; note = uracil
  source 1..57: mol_type = other DNA
tctgtacggtgacaaggcgtnnnactnnntgatgtatcttctagctctctgcctacc

SEQ ID NO: 615 - DNA, 57 bp, synthetic construct
  misc_feature 1..57: note = Synthetic Primer
  misc_difference 21..23: note = n is a, c, g, t or u
  misc_difference 27..29: note = n is a, c, g, t or u
  modified_base 20: mod_base = OTHER; note = uracil
  modified_base 33..34: mod_base = OTHER; note = uracil
  modified_base 43: mod_base = OTHER; note = uracil
  modified_base 46: mod_base = OTHER; note = uracil
  modified_base 55: mod_base = OTHER; note = uracil
  source 1..57: mol_type = other DNA
tctgtacggtgacaaggcgtnnnactnnntgattgacagccatcatcaaagagatcg

SEQ ID NO: 616 - DNA, 57 bp, synthetic construct
  misc_feature 1..57: note = Synthetic Primer
  misc_difference 21..23: note = n is a, c, g, t or u
  misc_difference 27..29: note = n is a, c, g, t or u
  modified_base 20: mod_base = OTHER; note = uracil
  modified_base 33: mod_base = OTHER; note = uracil
  modified_base 35..36: mod_base = OTHER; note = uracil
  modified_base 38: mod_base = OTHER; note = uracil
  modified_base 44: mod_base = OTHER; note = uracil
  modified_base 46: mod_base = OTHER; note = uracil
  modified_base 48: mod_base = OTHER; note = uracil
  modified_base 52..54: mod_base = OTHER; note = uracil
  source 1..57: mol_type = other DNA
tctgtacggtgacaaggcgtnnnactnnntgatattgtgaagatctgtgactttggc

SEQ ID NO: 617 - DNA, 57 bp, synthetic construct
  misc_feature 1..57: note = Synthetic Primer
  misc_difference 21..23: note = n is a, c, g, t or u
  misc_difference 27..29: note = n is a, c, g, t or u
  modified_base 20: mod_base = OTHER; note = uracil
  modified_base 33: mod_base = OTHER; note = uracil
  modified_base 41..42: mod_base = OTHER; note = uracil
  modified_base 45..47: mod_base = OTHER; note = uracil
  modified_base 56: mod_base = OTHER; note = uracil
  source 1..57: mol_type = other DNA
tctgtacggtgacaaggcgtnnnactnnntgatgagcgaattcctttggaaaacctg

SEQ ID NO: 618 - DNA, 57 bp, synthetic construct
  misc_feature 1..57: note = Synthetic Primer
  misc_difference 21..23: note = n is a, c, g, t or u
  misc_difference 27..29: note = n is a, c, g, t or u
  modified_base 20: mod_base = OTHER; note = uracil
  modified_base 33..34: mod_base = OTHER; note = uracil
  modified_base 36: mod_base = OTHER; note = uracil
  modified_base 41: mod_base = OTHER; note = uracil
  modified_base 43: mod_base = OTHER; note = uracil
  modified_base 50: mod_base = OTHER; note = uracil
  modified_base 54..55: mod_base = OTHER; note = uracil
  source 1..57: mol_type = other DNA
tctgtacggtgacaaggcgtnnnactnnntgattatccagtgtgcccactacattga

SEQ ID NO: 619 - DNA, 57 bp, synthetic construct
  misc_feature 1..57: note = Synthetic Primer
  misc_difference 21..23: note = n is a, c, g, t or u
  misc_difference 27..29: note = n is a, c, g, t or u
  modified_base 20: mod_base = OTHER; note = uracil
  modified_base 33..35: mod_base = OTHER; note = uracil
  modified_base 37..41: mod_base = OTHER; note = uracil
  modified_base 47: mod_base = OTHER; note = uracil
  source 1..57: mol_type = other DNA
tctgtacggtgacaaggcgtnnnactnnntgatttctttttcagagtgcaaccagca

SEQ ID NO: 620 - DNA, 57 bp, synthetic construct
  misc_feature 1..57: note = Synthetic Primer
  misc_difference 21..23: note = n is a, c, g, t or u
  misc_difference 27..29: note = n is a, c, g, t or u
  modified_base 20: mod_base = OTHER; note = uracil
  modified_base 33: mod_base = OTHER; note = uracil
  modified_base 35..36: mod_base = OTHER; note = uracil
  modified_base 49..51: mod_base = OTHER; note = uracil
  modified_base 53: mod_base = OTHER; note = uracil
  source 1..57: mol_type = other DNA
tctgtacggtgacaaggcgtnnnactnnntgatcttgcaagcaaaaagtttgtccac

SEQ ID NO: 621 - DNA, 57 bp, synthetic construct
  misc_feature 1..57: note = Synthetic Primer
  misc_difference 21..23: note = n is a, c, g, t or u
  misc_difference 27..29: note = n is a, c, g, t or u
  modified_base 20: mod_base = OTHER; note = uracil
  modified_base 33..34: mod_base = OTHER; note = uracil
  modified_base 36: mod_base = OTHER; note = uracil
  modified_base 39..41: mod_base = OTHER; note = uracil
  modified_base 48..49: mod_base = OTHER; note = uracil
  modified_base 52: mod_base = OTHER; note = uracil
  modified_base 54: mod_base = OTHER; note = uracil
  modified_base 56: mod_base = OTHER; note = uracil
  source 1..57: mol_type = other DNA
tctgtacggtgacaaggcgtnnnactnnntgattctgatttgccaagttgctctctt

SEQ ID NO: 622 - DNA, 57 bp, synthetic construct
  misc_feature 1..57: note = Synthetic Primer
  misc_difference 21..23: note = n is a, c, g, t or u
  misc_difference 27..29: note = n is a, c, g, t or u
  modified_base 20: mod_base = OTHER; note = uracil
  modified_base 33..38: mod_base = OTHER; note = uracil
  modified_base 40: mod_base = OTHER; note = uracil
  modified_base 42: mod_base = OTHER; note = uracil
  modified_base 54: mod_base = OTHER; note = uracil
  source 1..57: mol_type = other DNA
tctgtacggtgacaaggcgtnnnactnnntgattttttctgtccaccagggagtaac

SEQ ID NO: 623 - DNA, 57 bp, synthetic construct
  misc_feature 1..57: note = Synthetic Primer
  misc_difference 21..23: note = n is a, c, g, t or u
  misc_difference 27..29: note = n is a, c, g, t or u
  modified_base 20: mod_base = OTHER; note = uracil
  modified_base 33: mod_base = OTHER; note = uracil
  modified_base 35..36: mod_base = OTHER; note = uracil
  modified_base 39: mod_base = OTHER; note = uracil
  modified_base 44: mod_base = OTHER; note = uracil
  modified_base 49..50: mod_base = OTHER; note = uracil
  modified_base 54..55: mod_base = OTHER; note = uracil
  source 1..57: mol_type = other DNA
tctgtacggtgacaaggcgtnnnactnnntgatgttactgccatcgacttacattgg

SEQ ID NO: 624 - DNA, 57 bp, synthetic construct
  misc_feature 1..57: note = Synthetic Primer
  misc_difference 21..23: note = n is a, c, g, t or u
  misc_difference 27..29: note = n is a, c, g, t or u
  modified_base 20: mod_base = OTHER; note = uracil
  modified_base 33: mod_base = OTHER; note = uracil
  modified_base 38: mod_base = OTHER; note = uracil
  modified_base 41: mod_base = OTHER; note = uracil
  modified_base 44: mod_base = OTHER; note = uracil
  modified_base 54: mod_base = OTHER; note = uracil
  source 1..57: mol_type = other DNA
tctgtacggtgacaaggcgtnnnactnnntgatgagatagtggtgaaggacaatggc

SEQ ID NO: 625 - DNA, 57 bp, synthetic construct
  misc_feature 1..57: note = Synthetic Primer
  misc_difference 21..23: note = n is a, c, g, t or u
  misc_difference 27..29: note = n is a, c, g, t or u
  modified_base 20: mod_base = OTHER; note = uracil
  modified_base 33: mod_base = OTHER; note = uracil
  modified_base 35: mod_base = OTHER; note = uracil
  modified_base 38: mod_base = OTHER; note = uracil
  modified_base 41: mod_base = OTHER; note = uracil
  modified_base 43: mod_base = OTHER; note = uracil
  modified_base 46: mod_base = OTHER; note = uracil
  modified_base 49: mod_base = OTHER; note = uracil
  modified_base 53: mod_base = OTHER; note = uracil
  modified_base 56: mod_base = OTHER; note = uracil
  source 1..57: mol_type = other DNA
tctgtacggtgacaaggcgtnnnactnnntgatgtcctcatgtactggtccctcatt

SEQ ID NO: 626 - DNA, 57 bp, synthetic construct
  misc_feature 1..57: note = Synthetic Primer
  misc_difference 21..23: note = n is a, c, g, t or u
  misc_difference 27..29: note = n is a, c, g, t or u
  modified_base 20: mod_base = OTHER; note = uracil
  modified_base 33: mod_base = OTHER; note = uracil
  modified_base 35: mod_base = OTHER; note = uracil
  modified_base 39..40: mod_base = OTHER; note = uracil
  modified_base 44: mod_base = OTHER; note = uracil
  modified_base 46: mod_base = OTHER; note = uracil
  modified_base 48: mod_base = OTHER; note = uracil
  modified_base 51: mod_base = OTHER; note = uracil
  source 1..57: mol_type = other DNA
tctgtacggtgacaaggcgtnnnactnnntgatctgaattagctgtatcgtcaaggc

SEQ ID NO: 627 - DNA, 57 bp, synthetic construct
  misc_feature 1..57: note = Synthetic Primer
  misc_difference 21..23: note = n is a, c, g, t or u
  misc_difference 27..29: note = n is a, c, g, t or u
  modified_base 20: mod_base = OTHER; note = uracil
  modified_base 33: mod_base = OTHER; note = uracil
  modified_base 37: mod_base = OTHER; note = uracil
  modified_base 40: mod_base = OTHER; note = uracil
  modified_base 50: mod_base = OTHER; note = uracil
  source 1..57: mol_type = other DNA
tctgtacggtgacaaggcgtnnnactnnntgatcgatgctgagaaccaataccagac

SEQ ID NO: 628 - DNA, 57 bp, synthetic construct
  misc_feature 1..57: note = Synthetic Primer
  misc_difference 21..23: note = n is a, c, g, t or u
  misc_difference 27..29: note = n is a, c, g, t or u
  modified_base 20: mod_base = OTHER; note = uracil
  modified_base 33: mod_base = OTHER; note = uracil
  modified_base 35: mod_base = OTHER; note = uracil
  modified_base 37: mod_base = OTHER; note = uracil
  modified_base 40: mod_base = OTHER; note = uracil
  modified_base 44: mod_base = OTHER; note = uracil
  modified_base 47: mod_base = OTHER; note = uracil
  modified_base 49: mod_base = OTHER; note = uracil
  source 1..57: mol_type = other DNA
tctgtacggtgacaaggcgtnnnactnnntgatctctgctggatcatgtgagacaac

SEQ ID NO: 629 - DNA, 57 bp, synthetic construct
  misc_feature 1..57: note = Synthetic Primer
  misc_difference 21..23: note = n is a, c, g, t or u
  misc_difference 27..29: note = n is a, c, g, t or u
  modified_base 20: mod_base = OTHER; note = uracil
  modified_base 33: mod_base = OTHER; note = uracil
  modified_base 36: mod_base = OTHER; note = uracil
  modified_base 38: mod_base = OTHER; note = uracil
  modified_base 42: mod_base = OTHER; note = uracil
  modified_base 46: mod_base = OTHER; note = uracil
  modified_base 52: mod_base = OTHER; note = uracil
  source 1..57: mol_type = other DNA
tctgtacggtgacaaggcgtnnnactnnntgatcatctggatacatgcccatgaacc

SEQ ID NO: 630 - DNA, 57 bp, synthetic construct
  misc_feature 1..57: note = Synthetic Primer
  misc_difference 21..23: note = n is a, c, g, t or u
  misc_difference 27..29: note = n is a, c, g, t or u
  modified_base 20: mod_base = OTHER; note = uracil
  modified_base 33: mod_base = OTHER; note = uracil
  modified_base 40: mod_base = OTHER; note = uracil
  modified_base 42: mod_base = OTHER; note = uracil
  modified_base 48..49: mod_base = OTHER; note = uracil
  modified_base 54: mod_base = OTHER; note = uracil
  source 1..57: mol_type = other DNA
tctgtacggtgacaaggcgtnnnactnnntgatggagaatgtgaaaattccagtggc

SEQ ID NO: 631 - DNA, 57 bp, synthetic construct
  misc_feature 1..57: note = Synthetic Primer
  misc_difference 21..23: note = n is a, c, g, t or u
  misc_difference 27..29: note = n is a, c, g, t or u
  modified_base 20: mod_base = OTHER; note = uracil
  modified_base 33: mod_base = OTHER; note = uracil
  modified_base 35: mod_base = OTHER; note = uracil
  modified_base 41: mod_base = OTHER; note = uracil
  modified_base 43: mod_base = OTHER; note = uracil
  modified_base 49..50: mod_base = OTHER; note = uracil
  modified_base 54: mod_base = OTHER; note = uracil
  modified_base 56: mod_base = OTHER; note = uracil
  source 1..57: mol_type = other DNA
tctgtacggtgacaaggcgtnnnactnnntgatctgaccatgtggacattaggtgtg

SEQ ID NO: 632 - DNA, 57 bp, synthetic construct
  misc_feature 1..57: note = Synthetic Primer
  misc_difference 21..23: note = n is a, c, g, t or u
  misc_difference 27..29: note = n is a, c, g, t or u
  modified_base 20: mod_base = OTHER; note = uracil
  modified_base 33: mod_base = OTHER; note = uracil
  modified_base 36: mod_base = OTHER; note = uracil
  modified_base 47..49: mod_base = OTHER; note = uracil
  modified_base 53: mod_base = OTHER; note = uracil
  modified_base 55: mod_base = OTHER; note = uracil
  source 1..57: mol_type = other DNA
tctgtacggtgacaaggcgtnnnactnnntgatcctgaagaagacctttgactctgt

SEQ ID NO: 633 - DNA, 57 bp, synthetic construct
  misc_feature 1..57: note = Synthetic Primer
  misc_difference 21..23: note = n is a, c, g, t or u
  misc_difference 27..29: note = n is a, c, g, t or u
  modified_base 20: mod_base = OTHER; note = uracil
  modified_base 33: mod_base = OTHER; note = uracil
  modified_base 45: mod_base = OTHER; note = uracil
  modified_base 50..51: mod_base = OTHER; note = uracil
  modified_base 53..54: mod_base = OTHER; note = uracil
  source 1..57: mol_type = other DNA
tctgtacggtgacaaggcgtnnnactnnntgatgaggaggaggatgagattcttcca

SEQ ID NO: 634 - DNA, 57 bp, synthetic construct
  misc_feature 1..57: note = Synthetic Primer
  misc_difference 21..23: note = n is a, c, g, t or u
  misc_difference 27..29: note = n is a, c, g, t or u
  modified_base 20: mod_base = OTHER; note = uracil
  modified_base 33: mod_base = OTHER; note = uracil
  modified_base 35: mod_base = OTHER; note = uracil
  modified_base 38: mod_base = OTHER; note = uracil
  modified_base 46: mod_base = OTHER; note = uracil
  modified_base 56: mod_base = OTHER; note = uracil
  source 1..57: mol_type = other DNA
tctgtacggtgacaaggcgtnnnactnnntgatctcctagaagactccaagggagta

SEQ ID NO: 635 - DNA, 57 bp, synthetic construct
  misc_feature 1..57: note = Synthetic Primer
  misc_difference 21..23: note = n is a, c, g, t or u
  misc_difference 27..29: note = n is a, c, g, t or u
  modified_base 20: mod_base = OTHER; note = uracil
  modified_base 33..34: mod_base = OTHER; note = uracil
  modified_base 43: mod_base = OTHER; note = uracil
  modified_base 45: mod_base = OTHER; note = uracil
  modified_base 49: mod_base = OTHER; note = uracil
  modified_base 51: mod_base = OTHER; note = uracil
  modified_base 53: mod_base = OTHER; note = uracil
  modified_base 56: mod_base = OTHER; note = uracil
  source 1..57: mol_type = other DNA
tctgtacggtgacaaggcgtnnnactnnntgattggacgacatatacctgtgtgcta

SEQ ID NO: 636 - DNA, 57 bp, synthetic construct
  misc_feature 1..57: note = Synthetic Primer
  misc_difference 21..23: note = n is a, c, g, t or u
  misc_difference 27..29: note = n is a, c, g, t or u
  modified_base 20: mod_base = OTHER; note = uracil
  modified_base 33: mod_base = OTHER; note = uracil
  modified_base 36: mod_base = OTHER; note = uracil
  modified_base 39: mod_base = OTHER; note = uracil
  modified_base 46: mod_base = OTHER; note = uracil
  modified_base 52: mod_base = OTHER; note = uracil
  modified_base 55: mod_base = OTHER; note = uracil
  source 1..57: mol_type = other DNA
tctgtacggtgacaaggcgtnnnactnnntgataatgctacgaagtgggaatgatga

SEQ ID NO: 637 - DNA, 57 bp, synthetic construct
  misc_feature 1..57: note = Synthetic Primer
  misc_difference 21..23: note = n is a, c, g, t or u
  misc_difference 27..29: note = n is a, c, g, t or u
  modified_base 20: mod_base = OTHER; note = uracil
  modified_base 33..34: mod_base = OTHER; note = uracil
  modified_base 40: mod_base = OTHER; note = uracil
  modified_base 45..46: mod_base = OTHER; note = uracil
  modified_base 48: mod_base = OTHER; note = uracil
  modified_base 53: mod_base = OTHER; note = uracil
  modified_base 55: mod_base = OTHER; note = uracil
  source 1..57: mol_type = other DNA
tctgtacggtgacaaggcgtnnnactnnntgattcaggctaccattatggagtctgg

SEQ ID NO: 638 - DNA, 57 bp, synthetic construct
  misc_feature 1..57: note = Synthetic Primer
  misc_difference 21..23: note = n is a, c, g, t or u
  misc_difference 27..29: note = n is a, c, g, t or u
  modified_base 20: mod_base = OTHER; note = uracil
  modified_base 33..34: mod_base = OTHER; note = uracil
  modified_base 36..37: mod_base = OTHER; note = uracil
  modified_base 42: mod_base = OTHER; note = uracil
  modified_base 53..54: mod_base = OTHER; note = uracil
  modified_base 56: mod_base = OTHER; note = uracil
  source 1..57: mol_type = other DNA
tctgtacggtgacaaggcgtnnnactnnntgattcttacaatggcaggaccattctg

SEQ ID NO: 639 - DNA, 57 bp, synthetic construct
  misc_feature 1..57: note = Synthetic Primer
  misc_difference 21..23: note = n is a, c, g, t or u
  misc_difference 27..29: note = n is a, c, g, t or u
  modified_base 20: mod_base = OTHER; note = uracil
  modified_base 33..35: mod_base = OTHER; note = uracil
  modified_base 41: mod_base = OTHER; note = uracil
  modified_base 44: mod_base = OTHER; note = uracil
  modified_base 47..49: mod_base = OTHER; note = uracil
  modified_base 54: mod_base = OTHER; note = uracil
  modified_base 56: mod_base = OTHER; note = uracil
  source 1..57: mol_type = other DNA
tctgtacggtgacaaggcgtnnnactnnntgatttggaagtggtcatttcagatgtg

SEQ ID NO: 640 - DNA, 57 bp, synthetic construct
  misc_feature 1..57: note = Synthetic Primer
  misc_difference 21..23: note = n is a, c, g, t or u
  misc_difference 27..29: note = n is a, c, g, t or u
  modified_base 20: mod_base = OTHER; note = uracil
  modified_base 33: mod_base = OTHER; note = uracil
  modified_base 40: mod_base = OTHER; note = uracil
  modified_base 48..49: mod_base = OTHER; note = uracil
  modified_base 51: mod_base = OTHER; note = uracil
  source 1..57: mol_type = other DNA
tctgtacggtgacaaggcgtnnnactnnntgataagagatgcgccaattgtaaacaa

SEQ ID NO: 641 - DNA, 57 bp, synthetic construct
  misc_feature 1..57: note = Synthetic Primer
  misc_difference 21..23: note = n is a, c, g, t or u
  misc_difference 27..29: note = n is a, c, g, t or u
  modified_base 20: mod_base = OTHER; note = uracil
  modified_base 33: mod_base = OTHER; note = uracil
  modified_base 36..38: mod_base = OTHER; note = uracil
  modified_base 40: mod_base = OTHER; note = uracil
  modified_base 43..44: mod_base = OTHER; note = uracil
  modified_base 52: mod_base = OTHER; note = uracil
  source 1..57: mol_type = other DNA
tctgtacggtgacaaggcgtnnnactnnntgataatttctccttcagacaatgcagt

SEQ ID NO: 642 - DNA, 57 bp, synthetic construct
  misc_feature 1..57: note = Synthetic Primer
  misc_difference 21..23: note = n is a, c, g, t or u
  misc_difference 27..29: note = n is a, c, g, t or u
  modified_base 20: mod_base = OTHER; note = uracil
  modified_base 33: mod_base = OTHER; note = uracil
  modified_base 36: mod_base = OTHER; note = uracil
  modified_base 38..39: mod_base = OTHER; note = uracil
  modified_base 45..46: mod_base = OTHER; note = uracil
  modified_base 52: mod_base = OTHER; note = uracil
  source 1..57: mol_type = other DNA
tctgtacggtgacaaggcgtnnnactnnntgatgctcttccagcttaagaatgaacc

SEQ ID NO: 643 - DNA, 57 bp, synthetic construct
  misc_feature 1..57: note = Synthetic Primer
  misc_difference 21..23: note = n is a, c, g, t or u
  misc_difference 27..29: note = n is a, c, g, t or u
  modified_base 20: mod_base = OTHER; note = uracil
  modified_base 33: mod_base = OTHER; note = uracil
  modified_base 35: mod_base = OTHER; note = uracil
  modified_base 44: mod_base = OTHER; note = uracil
  modified_base 47: mod_base = OTHER; note = uracil
  modified_base 56: mod_base = OTHER; note = uracil
  source 1..57: mol_type = other DNA
tctgtacggtgacaaggcgtnnnactnnntgatatacagaagctgatgggccagata

SEQ ID NO: 644 - DNA, 57 bp, synthetic construct
  misc_feature 1..57: note = Synthetic Primer
  misc_difference 21..23: note = n is a, c, g, t or u
  misc_difference 27..29: note = n is a, c, g, t or u
  modified_base 20: mod_base = OTHER; note = uracil
  modified_base 33..34: mod_base = OTHER; note = uracil
  modified_base 40..41: mod_base = OTHER; note = uracil
  modified_base 49: mod_base = OTHER; note = uracil
  source 1..57: mol_type = other DNA
tctgtacggtgacaaggcgtnnnactnnntgattcagaattaccaagctacggaagc

SEQ ID NO: 645 - DNA, 57 bp, synthetic construct
  misc_feature 1..57: note = Synthetic Primer
  misc_difference 21..23: note = n is a, c, g, t or u
  misc_difference 27..29: note = n is a, c, g, t or u
  modified_base 20: mod_base = OTHER; note = uracil
  modified_base 33..34: mod_base = OTHER; note = uracil
  modified_base 37..38: mod_base = OTHER; note = uracil
  modified_base 43: mod_base = OTHER; note = uracil
  modified_base 45: mod_base = OTHER; note = uracil
  modified_base 47: mod_base = OTHER; note = uracil
  modified_base 49..50: mod_base = OTHER; note = uracil
  modified_base 56: mod_base = OTHER; note = uracil
  source 1..57: mol_type = other DNA
tctgtacggtgacaaggcgtnnnactnnntgattcgttaaagtctctcttcaccctg

SEQ ID NO: 646 - DNA, 57 bp, synthetic construct
  misc_feature 1..57: note = Synthetic Primer
  misc_difference 21..23: note = n is a, c, g, t or u
  misc_difference 27..29: note = n is a, c, g, t or u
  modified_base 20: mod_base = OTHER; note = uracil
  modified_base 33: mod_base = OTHER; note = uracil
  modified_base 40: mod_base = OTHER; note = uracil
  modified_base 42: mod_base = OTHER; note = uracil
  modified_base 44: mod_base = OTHER; note = uracil
  modified_base 48..49: mod_base = OTHER; note = uracil
  modified_base 55: mod_base = OTHER; note = uracil
  source 1..57: mol_type = other DNA
tctgtacggtgacaaggcgtnnnactnnntgatgccccatctatgagttcaagatca

SEQ ID NO: 647 - DNA, 57 bp, synthetic construct
  misc_feature 1..57: note = Synthetic Primer
  misc_difference 21..23: note = n is a, c, g, t or u
  misc_difference 27..29: note = n is a, c, g, t or u
  modified_base 20: mod_base = OTHER; note = uracil
  modified_base 33: mod_base = OTHER; note = uracil
  modified_base 39: mod_base = OTHER; note = uracil
  modified_base 52: mod_base = OTHER; note = uracil
  source 1..57: mol_type = other DNA
tctgtacggtgacaaggcgtnnnactnnntgatccgagtggcggaaagcaataaaat

SEQ ID NO: 648 - DNA, 57 bp, synthetic construct
  misc_feature 1..57: note = Synthetic Primer
  misc_difference 21..23: note = n is a, c, g, t or u
  misc_difference 27..29: note = n is a, c, g, t or u
  modified_base 20: mod_base = OTHER; note = uracil
  modified_base 33: mod_base = OTHER; note = uracil
  modified_base 44: mod_base = OTHER; note = uracil
  modified_base 48: mod_base = OTHER; note = uracil
  modified_base 53..54: mod_base = OTHER; note = uracil
  source 1..57: mol_type = other DNA
tctgtacggtgacaaggcgtnnnactnnntgatggacaaagggtggatgaaattgat

SEQ ID NO: 649 - DNA, 57 bp, synthetic construct
  misc_feature 1..57: note = Synthetic Primer
  misc_difference 21..23: note = n is a, c, g, t or u
  misc_difference 27..29: note = n is a, c, g, t or u
  modified_base 20: mod_base = OTHER; note = uracil
  modified_base 33: mod_base = OTHER; note = uracil
  modified_base 38: mod_base = OTHER; note = uracil
  modified_base 41: mod_base = OTHER; note = uracil
  modified_base 44: mod_base = OTHER; note = uracil
  modified_base 46: mod_base = OTHER; note = uracil
  modified_base 50: mod_base = OTHER; note = uracil
  source 1..57: mol_type = other DNA
tctgtacggtgacaaggcgtnnnactnnntgatccagtgatgatctcaatgggcaat

SEQ ID NO: 650 - DNA, 57 bp, synthetic construct
  misc_feature 1..57: note = Synthetic Primer
  misc_difference 21..23: note = n is a, c, g, t or u
  misc_difference 27..29: note = n is a, c, g, t or u
  modified_base 20: mod_base = OTHER; note = uracil
  modified_base 33: mod_base = OTHER; note = uracil
  modified_base 39: mod_base = OTHER; note = uracil
  modified_base 41..45: mod_base = OTHER; note = uracil
  source 1..57: mol_type = other DNA
tctgtacggtgacaaggcgtnnnactnnntgatcgaggtgtttttaccaccaagact

SEQ ID NO: 651 - DNA, 57 bp, synthetic construct
  misc_feature 1..57: note = Synthetic Primer
  misc_difference 21..23: note = n is a, c, g, t or u
  misc_difference 27..29: note = n is a, c, g, t or u
  modified_base 20: mod_base = OTHER; note = uracil
  modified_base 33: mod_base = OTHER; note = uracil
  modified_base 35: mod_base = OTHER; note = uracil
  modified_base 39: mod_base = OTHER; note = uracil
  modified_base 43: mod_base = OTHER; note = uracil
  modified_base 45: mod_base = OTHER; note = uracil
  modified_base 47: mod_base = OTHER; note = uracil
  modified_base 56: mod_base = OTHER; note = uracil
  source 1..57: mol_type = other DNA
tctgtacggtgacaaggcgtnnnactnnntgatgtaaatgactgtgtccagcaagtt

SEQ ID NO: 652 - DNA, 57 bp, synthetic construct
  misc_feature 1..57: note = Synthetic Primer
  misc_difference 21..23: note = n is a, c, g, t or u
  misc_difference 27..29: note = n is a, c, g, t or u
  modified_base 20: mod_base = OTHER; note = uracil
  modified_base 33: mod_base = OTHER; note = uracil
  modified_base 39: mod_base = OTHER; note = uracil
  modified_base 43: mod_base = OTHER; note = uracil
  modified_base 47: mod_base = OTHER; note = uracil
  modified_base 55: mod_base = OTHER; note = uracil
  source 1..57: mol_type = other DNA
tctgtacggtgacaaggcgtnnnactnnntgatacagctgcctacataaaggaatgg

SEQ ID NO: 653 - DNA, 57 bp, synthetic construct
  misc_feature 1..57: note = Synthetic Primer
  misc_difference 21..23: note = n is a, c, g, t or u
  misc_difference 27..29: note = n is a, c, g, t or u
  modified_base 20: mod_base = OTHER; note = uracil
  modified_base 33: mod_base = OTHER; note = uracil
  modified_base 35..37: mod_base = OTHER; note = uracil
  modified_base 44: mod_base = OTHER; note = uracil
  source 1..57: mol_type = other DNA
tctgtacggtgacaaggcgtnnnactnnntgatgtttgcaagatgaaaggagaaggg

SEQ ID NO: 654 - DNA, 57 bp, synthetic construct
  misc_feature 1..57: note = Synthetic Primer
  misc_difference 21..23: note = n is a, c, g, t or u
  misc_difference 27..29: note = n is a, c, g, t or u
  modified_base 20: mod_base = OTHER; note = uracil
  modified_base 33: mod_base = OTHER; note = uracil
  modified_base 38: mod_base = OTHER; note = uracil
  modified_base 52..53: mod_base = OTHER; note = uracil
  modified_base 56: mod_base = OTHER; note = uracil
  source 1..57: mol_type = other DNA
tctgtacggtgacaaggcgtnnnactnnntgatacactggaaaggaagagattcatg

SEQ ID NO: 655 - DNA, 57 bp, synthetic construct
  misc_feature 1..57: note = Synthetic Primer
  misc_difference 21..23: note = n is a, c, g, t or u
  misc_difference 27..29: note = n is a, c, g, t or u
  modified_base 20: mod_base = OTHER; note = uracil
  modified_base 33..34: mod_base = OTHER; note = uracil
  modified_base 37: mod_base = OTHER; note = uracil
  modified_base 46: mod_base = OTHER; note = uracil
  modified_base 49: mod_base = OTHER; note = uracil
  modified_base 56: mod_base = OTHER; note = uracil
  source 1..57: mol_type = other DNA
tctgtacggtgacaaggcgtnnnactnnntgattactggaggagatggtcaagaatc

SEQ ID NO: 656 - DNA, 57 bp, synthetic construct
  misc_feature 1..57: note = Synthetic Primer
  misc_difference 21..23: note = n is a, c, g, t or u
  misc_difference 27..29: note = n is a, c, g, t or u
  modified_base 20: mod_base = OTHER; note = uracil
  modified_base 33..35: mod_base = OTHER; note = uracil
  modified_base 37: mod_base = OTHER; note = uracil
  modified_base 43: mod_base = OTHER; note = uracil
  modified_base 45: mod_base = OTHER; note = uracil
  modified_base 50: mod_base = OTHER; note = uracil
  source 1..57: mol_type = other DNA
tctgtacggtgacaaggcgtnnnactnnntgatttgtacacatgtacaatgcccaat

SEQ ID NO: 657 - DNA, 57 bp, synthetic construct
  misc_feature 1..57: note = Synthetic Primer
  misc_difference 21..23: note = n is a, c, g, t or u
  misc_difference 27..29: note = n is a, c, g, t or u
  modified_base 20: mod_base = OTHER; note = uracil
  modified_base 33: mod_base = OTHER; note = uracil
  modified_base 38..42: mod_base = OTHER; note = uracil
  modified_base 46: mod_base = OTHER; note = uracil
  modified_base 49..51: mod_base = OTHER; note = uracil
  modified_base 53: mod_base = OTHER; note = uracil
  source 1..57: mol_type = other DNA
tctgtacggtgacaaggcgtnnnactnnntgatgcactttttggatactttgtgcct

SEQ ID NO: 658 - DNA, 57 bp, synthetic construct
  misc_feature 1..57: note = Synthetic Primer
  misc_difference 21..23: note = n is a, c, g, t or u
  misc_difference 27..29: note = n is a, c, g, t or u
  modified_base 20: mod_base = OTHER; note = uracil
  modified_base 33: mod_base = OTHER; note = uracil
  modified_base 39..41: mod_base = OTHER; note = uracil
  modified_base 43: mod_base = OTHER; note = uracil
  modified_base 45..48: mod_base = OTHER; note = uracil
  source 1..57: mol_type = other DNA
tctgtacggtgacaaggcgtnnnactnnntgatcgcaatttatgttttccaagccac

SEQ ID NO: 659 - DNA, 57 bp, synthetic construct
  misc_feature 1..57: note = Synthetic Primer
  misc_difference 21..23: note = n is a, c, g, t or u
  misc_difference 27..29: note = n is a, c, g, t or u
  modified_base 20: mod_base = OTHER; note = uracil
  modified_base 33: mod_base = OTHER; note = uracil
  modified_base 36: mod_base = OTHER; note = uracil
  modified_base 40: mod_base = OTHER; note = uracil
  modified_base 44: mod_base = OTHER; note = uracil
  modified_base 46..47: mod_base = OTHER; note = uracil
  modified_base 49..50: mod_base = OTHER; note = uracil
  modified_base 53: mod_base = OTHER; note = uracil
  source 1..57: mol_type = other DNA
tctgtacggtgacaaggcgtnnnactnnntgatgctccctggatattcttagtagcg

SEQ ID NO: 660 - DNA, 57 bp, synthetic construct
  misc_feature 1..57: note = Synthetic Primer
  misc_difference 21..23: note = n is a, c, g, t or u
  misc_difference 27..29: note = n is a, c, g, t or u
  modified_base 20: mod_base = OTHER; note = uracil
  modified_base 33: mod_base = OTHER; note = uracil
  modified_base 39: mod_base = OTHER; note = uracil
  modified_base 44..45: mod_base = OTHER; note = uracil
  modified_base 52: mod_base = OTHER; note = uracil
  modified_base 55: mod_base = OTHER; note = uracil
  source 1..57: mol_type = other DNA
tctgtacggtgacaaggcgtnnnactnnntgatagagctcgaattccagaatgatga

SEQ ID NO: 661 - DNA, 57 bp, synthetic construct
  misc_feature 1..57: note = Synthetic Primer
  misc_difference 21..23: note = n is a, c, g, t or u
  misc_difference 27..29: note = n is a, c, g, t or u
  modified_base 20: mod_base = OTHER; note = uracil
  modified_base 33: mod_base = OTHER; note = uracil
  modified_base 35..36: mod_base = OTHER; note = uracil
  modified_base 49: mod_base = OTHER; note = uracil
  modified_base 54..56: mod_base = OTHER; note = uracil
  source 1..57: mol_type = other DNA
tctgtacggtgacaaggcgtnnnactnnntgatcttcagcgaggaagctacactttt

SEQ ID NO: 662 - DNA, 57 bp, synthetic construct
  misc_feature 1..57: note = Synthetic Primer
  misc_difference 21..23: note = n is a, c, g, t or u
  misc_difference 27..29: note = n is a, c, g, t or u
  modified_base 20: mod_base = OTHER; note = uracil
  modified_base 33..34: mod_base = OTHER; note = uracil
  modified_base 37: mod_base = OTHER; note = uracil
  modified_base 42: mod_base = OTHER; note = uracil
  modified_base 45..47: mod_base = OTHER; note = uracil
  modified_base 53: mod_base = OTHER; note = uracil
  source 1..57: mol_type = other DNA
tctgtacggtgacaaggcgtnnnactnnntgattcatcaagtcctttgacagtgcat

SEQ ID NO: 663 - DNA, 57 bp, synthetic construct
  misc_feature 1..57: note = Synthetic Primer
  misc_difference 21..23: note = n is a, c, g, t or u
  misc_difference 27..29: note = n is a, c, g, t or u
  modified_base 20: mod_base = OTHER; note = uracil
  modified_base 33..34: mod_base = OTHER; note = uracil
  modified_base 41: mod_base = OTHER; note = uracil
  modified_base 44..46: mod_base = OTHER; note = uracil
  modified_base 49..51: mod_base = OTHER; note = uracil
  modified_base 53: mod_base = OTHER; note = uracil
  source 1..57: mol_type = other DNA
tctgtacggtgacaaggcgtnnnactnnntgattcagaagtggtttcctttctcacc

SEQ ID NO: 664 - DNA, 57 bp, synthetic construct
  misc_feature 1..57: note = Synthetic Primer
  misc_difference 21..23: note = n is a, c, g, t or u
  misc_difference 27..29: note = n is a, c, g, t or u
  modified_base 20: mod_base = OTHER; note = uracil
  modified_base 33: mod_base = OTHER; note = uracil
  modified_base 37..39: mod_base = OTHER; note = uracil
  modified_base 47: mod_base = OTHER; note = uracil
  source 1..57: mol_type = other DNA
tctgtacggtgacaaggcgtnnnactnnntgataagtttcggacagtacaaagaacg

SEQ ID NO: 665 - DNA, 57 bp, synthetic construct
  misc_feature 1..57: note = Synthetic Primer
  misc_difference 21..23: note = n is a, c, g, t or u
  misc_difference 27..29: note = n is a, c, g, t or u
  modified_base 20: mod_base = OTHER; note = uracil
  modified_base 33: mod_base = OTHER; note = uracil
  modified_base 38: mod_base = OTHER; note = uracil
  modified_base 44..45: mod_base = OTHER; note = uracil
  modified_base 48..49: mod_base = OTHER; note = uracil
  modified_base 51: mod_base = OTHER; note = uracil
  modified_base 55: mod_base = OTHER; note = uracil
  source 1..57: mol_type = other DNA
tctgtacggtgacaaggcgtnnnactnnntgatgaagtccaagttgcttctcagtct

SEQ ID NO: 666 - DNA, 57 bp, synthetic construct
  misc_feature 1..57: note = Synthetic Primer
  misc_difference 21..23: note = n is a, c, g, t or u
  misc_difference 27..29: note = n is a, c, g, t or u
  modified_base 20: mod_base = OTHER; note = uracil
  modified_base 33: mod_base = OTHER; note = uracil
  modified_base 36..37: mod_base = OTHER; note = uracil
  modified_base 54..55: mod_base = OTHER; note = uracil
  source 1..57: mol_type = other DNA
tctgtacggtgacaaggcgtnnnactnnntgatgcttggagcaagaaaaggaattgc

SEQ ID NO: 667 - DNA, 57 bp, synthetic construct
  misc_feature 1..57: note = Synthetic Primer
  misc_difference 21..23: note = n is a, c, g, t or u
  misc_difference 27..29: note = n is a, c, g, t or u
  modified_base 20: mod_base = OTHER; note = uracil
  modified_base 33: mod_base = OTHER; note = uracil
  modified_base 39: mod_base = OTHER; note = uracil
  modified_base 50..51: mod_base = OTHER; note = uracil
  modified_base 55: mod_base = OTHER; note = uracil
  source 1..57: mol_type = other DNA
tctgtacggtgacaaggcgtnnnactnnntgataccaatccagaaaaccttccatcg

SEQ ID NO: 668 - DNA, 57 bp, synthetic construct
  misc_feature 1..57: note = Synthetic Primer
  misc_difference 21..23: note = n is a, c, g, t or u
  misc_difference 27..29: note = n is a, c, g, t or u
  modified_base 20: mod_base = OTHER; note = uracil
  modified_base 33: mod_base = OTHER; note = uracil
  modified_base 37: mod_base = OTHER; note = uracil
  modified_base 39: mod_base = OTHER; note = uracil
  modified_base 46: mod_base = OTHER; note = uracil
  modified_base 51..52: mod_base = OTHER; note = uracil
  modified_base 55: mod_base = OTHER; note = uracil
  source 1..57: mol_type = other DNA
tctgtacggtgacaaggcgtnnnactnnntgatcagtgtgccagataccattgatga

SEQ ID NO: 669 - DNA, 57 bp, synthetic construct
  misc_feature 1..57: note = Synthetic Primer
  misc_difference 21..23: note = n is a, c, g, t or u
  misc_difference 27..29: note = n is a, c, g, t or u
  modified_base 20: mod_base = OTHER; note = uracil
  modified_base 33..34: mod_base = OTHER; note = uracil
  modified_base 37: mod_base = OTHER; note = uracil
  modified_base 40..41: mod_base = OTHER; note = uracil
  modified_base 43..44: mod_base = OTHER; note = uracil
  modified_base 46: mod_base = OTHER; note = uracil
  modified_base 50: mod_base = OTHER; note = uracil
  source 1..57: mol_type = other DNA
tctgtacggtgacaaggcgtnnnactnnntgattcatcattattctggctggagcaa

SEQ ID NO: 670 - DNA, 57 bp, synthetic construct
  misc_feature 1..57: note = Synthetic Primer
  misc_difference 21..23: note = n is a, c, g, t or u
  misc_difference 27..29: note = n is a, c, g, t or u
  modified_base 20: mod_base = OTHER; note = uracil
  modified_base 33: mod_base = OTHER; note = uracil
  modified_base 35: mod_base = OTHER; note = uracil
  modified_base 37: mod_base = OTHER; note = uracil
  modified_base 42..45: mod_base = OTHER; note = uracil
  modified_base 47..49: mod_base = OTHER; note = uracil
  modified_base 52..54: mod_base = OTHER; note = uracil
  modified_base 56: mod_base = OTHER; note = uracil
  source 1..57: mol_type = other DNA
tctgtacggtgacaaggcgtnnnactnnntgatatgtaggcttttgtttcgtttgtg

SEQ ID NO: 671 - DNA, 57 bp, synthetic construct
  misc_feature 1..57: note = Synthetic Primer
  misc_difference 21..23: note = n is a, c, g, t or u
  misc_difference 27..29: note = n is a, c, g, t or u
  modified_base 20: mod_base = OTHER; note = uracil
  modified_base 33: mod_base = OTHER; note = uracil
  modified_base 35: mod_base = OTHER; note = uracil
  modified_base 50: mod_base = OTHER; note = uracil
  modified_base 53: mod_base = OTHER; note = uracil
  modified_base 56: mod_base = OTHER; note = uracil
  source 1..57: mol_type = other DNA
tctgtacggtgacaaggcgtnnnactnnntgatctggcaacaaacaagatactggtg

SEQ ID NO: 672 - DNA, 57 bp, synthetic construct
  misc_feature 1..57: note = Synthetic Primer
  misc_difference 21..23: note = n is a, c, g, t or u
  misc_difference 27..29: note = n is a, c, g, t or u
  modified_base 20: mod_base = OTHER; note = uracil
  modified_base 33..34: mod_base = OTHER; note = uracil
  modified_base 37: mod_base = OTHER; note = uracil
  modified_base 41..44: mod_base = OTHER; note = uracil
  modified_base 50: mod_base = OTHER; note = uracil
  modified_base 52: mod_base = OTHER; note = uracil
  modified_base 54: mod_base = OTHER; note = uracil
  source 1..57: mol_type = other DNA
tctgtacggtgacaaggcgtnnnactnnntgattcgtggcttttgacaatatctcca

SEQ ID NO: 673 - DNA, 57 bp, synthetic construct
  misc_feature 1..57: note = Synthetic Primer
  misc_difference 21..23: note = n is a, c, g, t or u
  misc_difference 27..29: note = n is a, c, g, t or u
  modified_base 20: mod_base = OTHER; note = uracil
  modified_base 33: mod_base = OTHER; note = uracil
  modified_base 38: mod_base = OTHER; note = uracil
  modified_base 42: mod_base = OTHER; note = uracil
  modified_base 45: mod_base = OTHER; note = uracil
  modified_base 49..50: mod_base = OTHER; note = uracil
  modified_base 52: mod_base = OTHER; note = uracil
  source 1..57: mol_type = other DNA
tctgtacggtgacaaggcgtnnnactnnntgatagaataactcctcggttctagggc

SEQ ID NO: 674 - DNA, 57 bp, synthetic construct
  misc_feature 1..57: note = Synthetic Primer
  misc_difference 21..23: note = n is a, c, g, t or u
  misc_difference 27..29: note = n is a, c, g, t or u
  modified_base 20: mod_base = OTHER; note = uracil
  modified_base 33..34: mod_base = OTHER; note = uracil
  modified_base 36: mod_base = OTHER; note = uracil
  modified_base 38: mod_base = OTHER; note = uracil
  modified_base 42: mod_base = OTHER; note = uracil
  modified_base 44: mod_base = OTHER; note = uracil
  modified_base 49..50: mod_base = OTHER; note = uracil
  source 1..57: mol_type = other DNA
tctgtacggtgacaaggcgtnnnactnnntgattctctgagtatgagcttcccgaag

SEQ ID NO: 675 - DNA, 57 bp, synthetic construct
  misc_feature 1..57: note = Synthetic Primer
  misc_difference 21..23: note = n is a, c, g, t or u
  misc_difference 27..29: note = n is a, c, g, t or u
  modified_base 20: mod_base = OTHER; note = uracil
  modified_base 33: mod_base = OTHER; note = uracil
  modified_base 37: mod_base = OTHER; note = uracil
  modified_base 41: mod_base = OTHER; note = uracil
  modified_base 43..47: mod_base = OTHER; note = uracil
  modified_base 54..55: mod_base = OTHER; note = uracil
  source 1..57: mol_type = other DNA
tctgtacggtgacaaggcgtnnnactnnntgatacgtccatctttttaagggattgc

SEQ ID NO: 676 - DNA, 57 bp, synthetic construct
  misc_feature 1..57: note = Synthetic Primer
  misc_difference 21..23: note = n is a, c, g, t or u
  misc_difference 27..29: note = n is a, c, g, t or u
  modified_base 20: mod_base = OTHER; note = uracil
  modified_base 33: mod_base = OTHER; note = uracil
  modified_base 35: mod_base = OTHER; note = uracil
  modified_base 38..39: mod_base = OTHER; note = uracil
  modified_base 43: mod_base = OTHER; note = uracil
  modified_base 54: mod_base = OTHER; note = uracil
  modified_base 56: mod_base = OTHER; note = uracil
  source 1..57: mol_type = other DNA
tctgtacggtgacaaggcgtnnnactnnntgatgtcattacgtcaacgcaacgtcta

SEQ ID NO: 677 - DNA, 57 bp, synthetic construct
  misc_feature 1..57: note = Synthetic Primer
  misc_difference 21..23: note = n is a, c, g, t or u
  misc_difference 27..29: note = n is a, c, g, t or u
  modified_base 20: mod_base = OTHER; note = uracil
  modified_base 33..34: mod_base = OTHER; note = uracil
  modified_base 42: mod_base = OTHER; note = uracil
  modified_base 52: mod_base = OTHER; note = uracil
  modified_base 54..55: mod_base = OTHER; note = uracil
  source 1..57: mol_type = other DNA
tctgtacggtgacaaggcgtnnnactnnntgattccacacataaacggcagtgttaa

SEQ ID NO: 678 - DNA, 57 bp, synthetic construct
  misc_feature 1..57: note = Synthetic Primer
  misc_difference 21..23: note = n is a, c, g, t or u
  misc_difference 27..29: note = n is a, c, g, t or u
  modified_base 20: mod_base = OTHER; note = uracil
  modified_base 33: mod_base = OTHER; note = uracil
  modified_base 44: mod_base = OTHER; note = uracil
  modified_base 46..48: mod_base = OTHER; note = uracil
  source 1..57: mol_type = other DNA
tctgtacggtgacaaggcgtnnnactnnntgatgagaaaagcctgtttaccaaggag

SEQ ID NO: 679 - DNA, 57 bp, synthetic construct
  misc_feature 1..57: note = Synthetic Primer
  misc_difference 21..23: note = n is a, c, g, t or u
  misc_difference 27..29: note = n is a, c, g, t or u
  modified_base 20: mod_base = OTHER; note = uracil
  modified_base 33: mod_base = OTHER; note = uracil
  modified_base 39: mod_base = OTHER; note = uracil
  modified_base 41..42: mod_base = OTHER; note = uracil
  modified_base 47: mod_base = OTHER; note = uracil
  modified_base 49: mod_base = OTHER; note = uracil
  source 1..57: mol_type = other DNA
tctgtacggtgacaaggcgtnnnactnnntgatggagatcttcacctatggaaagca

SEQ ID NO: 680 - DNA, 57 bp, synthetic construct
  misc_feature 1..57: note = Synthetic Primer
  misc_difference 21..23: note = n is a, c, g, t or u
  misc_difference 27..29: note = n is a, c, g, t or u
  modified_base 20: mod_base = OTHER; note = uracil
  modified_base 33: mod_base = OTHER; note = uracil
  modified_base 36: mod_base = OTHER; note = uracil
  modified_base 38..39: mod_base = OTHER; note = uracil
  modified_base 41: mod_base = OTHER; note = uracil
  modified_base 48..51: mod_base = OTHER; note = uracil
  modified_base 56: mod_base = OTHER; note = uracil
  source 1..57: mol_type = other DNA
tctgtacggtgacaaggcgtnnnactnnntgatcgtgttgtgggagattttcaccta

SEQ ID NO: 681 - DNA, 58 bp, synthetic construct
  misc_feature 1..58: note = Synthetic Primer
  misc_difference 21..23: note = n is a, c, g, t or u
  misc_difference 27..29: note = n is a, c, g, t or u
  modified_base 20: mod_base = OTHER; note = uracil
  modified_base 33..34: mod_base = OTHER; note = uracil
  modified_base 36: mod_base = OTHER; note = uracil
  modified_base 39: mod_base = OTHER; note = uracil
  modified_base 42: mod_base = OTHER; note = uracil
  modified_base 45..47: mod_base = OTHER; note = uracil
  modified_base 49: mod_base = OTHER; note = uracil
  source 1..58: mol_type = other DNA
tctgtacggtgacaaggcgtnnnactnnntgattgtcctggtcatttatagaaaccga

SEQ ID NO: 682 - DNA, 58 bp, synthetic construct
  misc_feature 1..58: note = Synthetic Primer
  misc_difference 21..23: note = n is a, c, g, t or u
  misc_difference 27..29: note = n is a, c, g, t or u
  modified_base 20: mod_base = OTHER; note = uracil
  modified_base 33: mod_base = OTHER; note = uracil
  modified_base 36..37: mod_base = OTHER; note = uracil
  modified_base 40: mod_base = OTHER; note = uracil
  modified_base 45..46: mod_base = OTHER; note = uracil
  modified_base 48..51: mod_base = OTHER; note = uracil
  modified_base 53: mod_base = OTHER; note = uracil
  modified_base 55: mod_base = OTHER; note = uracil
  source 1..58: mol_type = other DNA
tctgtacggtgacaaggcgtnnnactnnntgatagttcgtgggcttgttttgtatcaa

SEQ ID NO: 683 - DNA, 58 bp, synthetic construct
  misc_feature 1..58: note = Synthetic Primer
  misc_difference 21..23: note = n is a, c, g, t or u
  misc_difference 27..29: note = n is a, c, g, t or u
  modified_base 20: mod_base = OTHER; note = uracil
  modified_base 33: mod_base = OTHER; note = uracil
  modified_base 36..37: mod_base = OTHER; note = uracil
  modified_base 41: mod_base = OTHER; note = uracil
  modified_base 43: mod_base = OTHER; note = uracil
  modified_base 49..50: mod_base = OTHER; note = uracil
  source 1..58: mol_type = other DNA
tctgtacggtgacaaggcgtnnnactnnntgatggttgaatgtaaggcttacaacgat

SEQ ID NO: 684 - DNA, 58 bp, synthetic construct
  misc_feature 1..58: note = Synthetic Primer
  misc_difference 21..23: note = n is a, c, g, t or u
  misc_difference 27..29: note = n is a, c, g, t or u
  modified_base 20: mod_base = OTHER; note = uracil
  modified_base 33: mod_base = OTHER; note = uracil
  modified_base 35: mod_base = OTHER; note = uracil
  modified_base 38..39: mod_base = OTHER; note = uracil
  modified_base 41: mod_base = OTHER; note = uracil
  modified_base 45..46: mod_base = OTHER; note = uracil
  modified_base 50: mod_base = OTHER; note = uracil
  modified_base 54..55: mod_base = OTHER; note = uracil
  modified_base 57: mod_base = OTHER; note = uracil
  source 1..58: mol_type = other DNA
tctgtacggtgacaaggcgtnnnactnnntgatgtggttctggattagctggattgtc

SEQ ID NO: 685 - DNA, 58 bp, synthetic construct
  misc_feature 1..58: note = Synthetic Primer
  misc_difference 21..23: note = n is a, c, g, t or u
  misc_difference 27..29: note = n is a, c, g, t or u
  modified_base 20: mod_base = OTHER; note = uracil
  modified_base 33: mod_base = OTHER; note = uracil
  modified_base 35: mod_base = OTHER; note = uracil
  modified_base 37: mod_base = OTHER; note = uracil
  modified_base 41: mod_base = OTHER; note = uracil
  modified_base 44..45: mod_base = OTHER; note = uracil
  modified_base 52..53: mod_base = OTHER; note = uracil
  modified_base 57: mod_base = OTHER; note = uracil
  source 1..58: mol_type = other DNA
tctgtacggtgacaaggcgtnnnactnnntgatatgtgcctccttcaggaattcaatc

SEQ ID NO: 686 - DNA, 58 bp, synthetic construct
  misc_feature 1..58: note = Synthetic Primer
  misc_difference 21..23: note = n is a, c, g, t or u
  misc_difference 27..29: note = n is a, c, g, t or u
  modified_base 20: mod_base = OTHER; note = uracil
  modified_base 33: mod_base = OTHER; note = uracil
  modified_base 41..42: mod_base = OTHER; note = uracil
  modified_base 44..46: mod_base = OTHER; note = uracil
  modified_base 48..51: mod_base = OTHER; note = uracil
  source 1..58: mol_type = other DNA
tctgtacggtgacaaggcgtnnnactnnntgataaccaagttctttcttttgcacagg

SEQ ID NO: 687 - DNA, 58 bp, synthetic construct
  misc_feature 1..58: note = Synthetic Primer
  misc_difference 21..23: note = n is a, c, g, t or u
  misc_difference 27..29: note = n is a, c, g, t or u
  modified_base 20: mod_base = OTHER; note = uracil
  modified_base 33: mod_base = OTHER; note = uracil
  modified_base 38: mod_base = OTHER; note = uracil
  modified_base 44: mod_base = OTHER; note = uracil
  modified_base 48: mod_base = OTHER; note = uracil
  modified_base 51: mod_base = OTHER; note = uracil
  modified_base 53..54: mod_base = OTHER; note = uracil
  source 1..58: mol_type = other DNA
tctgtacggtgacaaggcgtnnnactnnntgatgacctcaccatagctaatcttggga

SEQ ID NO: 688 - DNA, 58 bp, synthetic construct
  misc_feature 1..58: note = Synthetic Primer
  misc_difference 21..23: note = n is a, c, g, t or u
  misc_difference 27..29: note = n is a, c, g, t or u
  modified_base 20: mod_base = OTHER; note = uracil
  modified_base 33: mod_base = OTHER; note = uracil
  modified_base 41..42: mod_base = OTHER; note = uracil
  modified_base 44: mod_base = OTHER; note = uracil
  modified_base 48..49: mod_base = OTHER; note = uracil
  modified_base 55: mod_base = OTHER; note = uracil
  modified_base 57: mod_base = OTHER; note = uracil
  source 1..58: mol_type = other DNA
tctgtacggtgacaaggcgtnnnactnnntgatccagcacttctgcattggaactatt

SEQ ID NO: 689 - DNA, 58 bp, synthetic construct
  misc_feature 1..58: note = Synthetic Primer
  misc_difference 21..23: note = n is a, c, g, t or u
  misc_difference 27..29: note = n is a, c, g, t or u
  modified_base 20: mod_base = OTHER; note = uracil
  modified_base 33..35: mod_base = OTHER; note = uracil
  modified_base 39..40: mod_base = OTHER; note = uracil
  modified_base 42: mod_base = OTHER; note = uracil
  modified_base 44: mod_base = OTHER; note = uracil
  modified_base 46..50: mod_base = OTHER; note = uracil
  modified_base 57: mod_base = OTHER; note = uracil
  source 1..58: mol_type = other DNA
tctgtacggtgacaaggcgtnnnactnnntgatttgcattgtgtgtttttgaccactg

SEQ ID NO: 690 - DNA, 58 bp, synthetic construct
  misc_feature 1..58: note = Synthetic Primer
  misc_difference 21..23: note = n is a, c, g, t or u
  misc_difference 27..29: note = n is a, c, g, t or u
  modified_base 20: mod_base = OTHER; note = uracil
  modified_base 33: mod_base = OTHER; note = uracil
  modified_base 37: mod_base = OTHER; note = uracil
  modified_base 40..41: mod_base = OTHER; note = uracil
  modified_base 44..48: mod_base = OTHER; note = uracil
  modified_base 51: mod_base = OTHER; note = uracil
  modified_base 53: mod_base = OTHER; note = uracil
  modified_base 55: mod_base = OTHER; note = uracil
  modified_base 57: mod_base = OTHER; note = uracil
  source 1..58: mol_type = other DNA
tctgtacggtgacaaggcgtnnnactnnntgatccctcattcctttttcctctgtgta

SEQ ID NO: 691 - DNA, 58 bp, synthetic construct
  misc_feature 1..58: note = Synthetic Primer
  misc_difference 21..23: note = n is a, c, g, t or u
  misc_difference 27..29: note = n is a, c, g, t or u
  modified_base 20: mod_base = OTHER; note = uracil
  modified_base 33: mod_base = OTHER; note = uracil
  modified_base 44: mod_base = OTHER; note = uracil
  modified_base 49: mod_base = OTHER; note = uracil
  modified_base 51: mod_base = OTHER; note = uracil
  source 1..58: mol_type = other DNA
tctgtacggtgacaaggcgtnnnactnnntgatcccagccaagtagaatgtgaaagac

SEQ ID NO: 692 - DNA, 58 bp, synthetic construct
  misc_feature 1..58: note = Synthetic Primer
  misc_difference 21..23: note = n is a, c, g, t or u
  misc_difference 27..29: note = n is a, c, g, t or u
  modified_base 20: mod_base = OTHER; note = uracil
  modified_base 33: mod_base = OTHER; note = uracil
  modified_base 35..39: mod_base = OTHER; note = uracil
  modified_base 42: mod_base = OTHER; note = uracil
  modified_base 45: mod_base = OTHER; note = uracil
  modified_base 48: mod_base = OTHER; note = uracil
  modified_base 54: mod_base = OTHER; note = uracil
  modified_base 57: mod_base = OTHER; note = uracil
  source 1..58: mol_type = other DNA
tctgtacggtgacaaggcgtnnnactnnntgatgtttttcctcctactcaccatcctg

SEQ ID NO: 693 - DNA, 58 bp, synthetic construct
  misc_feature 1..58: note = Synthetic Primer
  misc_difference 21..23: note = n is a, c, g, t or u
  misc_difference 27..29: note = n is a, c, g, t or u
  modified_base 20: mod_base = OTHER; note = uracil
  modified_base 33: mod_base = OTHER; note = uracil
  modified_base 39: mod_base = OTHER; note = uracil
  modified_base 41..44: mod_base = OTHER; note = uracil
  modified_base 46: mod_base = OTHER; note = uracil
  modified_base 48: mod_base = OTHER; note = uracil
  modified_base 50: mod_base = OTHER; note = uracil
  modified_base 53: mod_base = OTHER; note = uracil
  modified_base 55..56: mod_base = OTHER; note = uracil
  source 1..58: mol_type = other DNA
tctgtacggtgacaaggcgtnnnactnnntgatgagcctgttttgtgtctactgttct

SEQ ID NO: 694 - DNA, 58 bp, synthetic construct
  misc_feature 1..58: note = Synthetic Primer
  misc_difference 21..23: note = n is a, c, g, t or u
  misc_difference 27..29: note = n is a, c, g, t or u
  modified_base 20: mod_base = OTHER; note = uracil
  modified_base 33: mod_base = OTHER; note = uracil
  modified_base 44..45: mod_base = OTHER; note = uracil
  modified_base 52: mod_base = OTHER; note = uracil
  modified_base 54..56: mod_base = OTHER; note = uracil
  source 1..58: mol_type = other DNA
tctgtacggtgacaaggcgtnnnactnnntgatggaccagagcttcaagactgtttag

SEQ ID NO: 695 - DNA, 58 bp, synthetic construct
  misc_feature 1..58: note = Synthetic Primer
  misc_difference 21..23: note = n is a, c, g, t or u
  misc_difference 27..29: note = n is a, c, g, t or u
  modified_base 20: mod_base = OTHER; note = uracil
  modified_base 33..34: mod_base = OTHER; note = uracil
  modified_base 37: mod_base = OTHER; note = uracil
  modified_base 40: mod_base = OTHER; note = uracil
  modified_base 43: mod_base = OTHER; note = uracil
  modified_base 45..46: mod_base = OTHER; note = uracil
  modified_base 50: mod_base = OTHER; note = uracil
  modified_base 54: mod_base = OTHER; note = uracil
  source 1..58: mol_type = other DNA
tctgtacggtgacaaggcgtnnnactnnntgattcctcctcctcttccctagataact

SEQ ID NO: 696 - DNA, 58 bp, synthetic construct
  misc_feature 1..58: note = Synthetic Primer
  misc_difference 21..23: note = n is a, c, g, t or u
  misc_difference 27..29: note = n is a, c, g, t or u
  modified_base 20: mod_base = OTHER; note = uracil
  modified_base 33: mod_base = OTHER; note = uracil
  modified_base 36: mod_base = OTHER; note = uracil
  modified_base 39..40: mod_base = OTHER; note = uracil
  modified_base 42..43: mod_base = OTHER; note = uracil
  modified_base 54: mod_base = OTHER; note = uracil
  source 1..58: mol_type = other DNA
tctgtacggtgacaaggcgtnnnactnnntgatcatcattcttgaggaggaagtagcg

SEQ ID NO: 697 - DNA, 58 bp, synthetic construct
  misc_feature 1..58: note = Synthetic Primer
  misc_difference 21..23: note = n is a, c, g, t or u
  misc_difference 27..29: note = n is a, c, g, t or u
  modified_base 20: mod_base = OTHER; note = uracil
  modified_base 33: mod_base = OTHER; note = uracil
  modified_base 37: mod_base = OTHER; note = uracil
  modified_base 39: mod_base = OTHER; note = uracil
  modified_base 43: mod_base = OTHER; note = uracil
  modified_base 55..57: mod_base = OTHER; note = uracil
  source 1..58: mol_type = other DNA
tctgtacggtgacaaggcgtnnnactnnntgatcactctacctccagcacagaatttg

SEQ ID NO: 698 - DNA, 58 bp, synthetic construct
  misc_feature 1..58: note = Synthetic Primer
  misc_difference 21..23: note = n is a, c, g, t or u
  misc_difference 27..29: note = n is a, c, g, t or u
  modified_base 20: mod_base = OTHER; note = uracil
  modified_base 33: mod_base = OTHER; note = uracil
  modified_base 36..37: mod_base = OTHER; note = uracil
  modified_base 45: mod_base = OTHER; note = uracil
  modified_base 49..51: mod_base = OTHER; note = uracil
  modified_base 53: mod_base = OTHER; note = uracil
  source 1..58: mol_type = other DNA
tctgtacggtgacaaggcgtnnnactnnntgatccttagacaactacctttctacgga

SEQ ID NO: 699 - DNA, 58 bp, synthetic construct
  misc_feature 1..58: note = Synthetic Primer
  misc_difference 21..23: note = n is a, c, g, t or u
  misc_difference 27..29: note = n is a, c, g, t or u
  modified_base 20: mod_base = OTHER; note = uracil
  modified_base 33: mod_base = OTHER; note = uracil
  modified_base 36: mod_base = OTHER; note = uracil
  modified_base 39: mod_base = OTHER; note = uracil
  modified_base 41..42: mod_base = OTHER; note = uracil
  source 1..58: mol_type = other DNA
tctgtacggtgacaaggcgtnnnactnnntgatactcctcttcagaggagaaagaaac

SEQ ID NO: 700 - DNA, 58 bp, synthetic construct
  misc_feature 1..58: note = Synthetic Primer
  misc_difference 21..23: note = n is a, c, g, t or u
  misc_difference 27..29: note = n is a, c, g, t or u
  modified_base 20: mod_base = OTHER; note = uracil
  modified_base 33..34: mod_base = OTHER; note = uracil
  modified_base 38: mod_base = OTHER; note = uracil
  modified_base 44: mod_base = OTHER; note = uracil
  modified_base 54: mod_base = OTHER; note = uracil
  source 1..58: mol_type = other DNA
tctgtacggtgacaaggcgtnnnactnnntgattgactaagaatgggaaggagtcacc

SEQ ID NO: 701 - DNA, 58 bp, synthetic construct
  misc_feature 1..58: note = Synthetic Primer
  misc_difference 21..23: note = n is a, c, g, t or u
  misc_difference 27..29: note = n is a, c, g, t or u
  modified_base 20: mod_base = OTHER; note = uracil
  modified_base 33..34: mod_base = OTHER; note = uracil
  modified_base 37: mod_base = OTHER; note = uracil
  modified_base 39..40: mod_base = OTHER; note = uracil
  modified_base 43: mod_base = OTHER; note = uracil
  modified_base 49..51: mod_base = OTHER; note = uracil
  modified_base 56..57: mod_base = OTHER; note = uracil
  source 1..58: mol_type = other DNA
tctgtacggtgacaaggcgtnnnactnnntgattcctgttcctcccagtttaagattt

SEQ ID NO: 702 - DNA, 58 bp, synthetic construct
  misc_feature 1..58: note = Synthetic Primer
  misc_difference 21..23: note = n is a, c, g, t or u
  misc_difference 27..29: note = n is a, c, g, t or u
  modified_base 20: mod_base = OTHER; note = uracil
  modified_base 33: mod_base = OTHER; note = uracil
  modified_base 51: mod_base = OTHER; note = uracil
  modified_base 53..55: mod_base = OTHER; note = uracil
  source 1..58: mol_type = other DNA
tctgtacggtgacaaggcgtnnnactnnntgatgccaacacaagagaaaatatttgct

SEQ ID NO: 703 - DNA, 58 bp, synthetic construct
  misc_feature 1..58: note = Synthetic Primer
  misc_difference 21..23: note = n is a, c, g, t or u
  misc_difference 27..29: note = n is a, c, g, t or u
  modified_base 20: mod_base = OTHER; note = uracil
  modified_base 33: mod_base = OTHER; note = uracil
  modified_base 37: mod_base = OTHER; note = uracil
  modified_base 39: mod_base = OTHER; note = uracil
  modified_base 42..43: mod_base = OTHER; note = uracil
  modified_base 46: mod_base = OTHER; note = uracil
  modified_base 52: mod_base = OTHER; note = uracil
  source 1..58: mol_type = other DNA
tctgtacggtgacaaggcgtnnnactnnntgatccatctcattaatgacaatcagcca

SEQ ID NO: 704 - DNA, 58 bp, synthetic construct
  misc_feature 1..58: note = Synthetic Primer
  misc_difference 21..23: note = n is a, c, g, t or u
  misc_difference 27..29: note = n is a, c, g, t or u
  modified_base 20: mod_base = OTHER; note = uracil
  modified_base 33: mod_base = OTHER; note = uracil
  modified_base 45: mod_base = OTHER; note = uracil
  modified_base 47: mod_base = OTHER; note = uracil
  modified_base 49: mod_base = OTHER; note = uracil
  modified_base 54: mod_base = OTHER; note = uracil
  modified_base 57: mod_base = OTHER; note = uracil
  source 1..58: mol_type = other DNA
tctgtacggtgacaaggcgtnnnactnnntgataagcagaggcatctgtaaagtcatg

SEQ ID NO: 705 - DNA, 58 bp, synthetic construct
  misc_feature 1..58: note = Synthetic Primer
  misc_difference 21..23: note = n is a, c, g, t or u
  misc_difference 27..29: note = n is a, c, g, t or u
  modified_base 20: mod_base = OTHER; note = uracil
  modified_base 33: mod_base = OTHER; note = uracil
  modified_base 39..40: mod_base = OTHER; note = uracil
  modified_base 48: mod_base = OTHER; note = uracil
  modified_base 51: mod_base = OTHER; note = uracil
  source 1..58: mol_type = other DNA
tctgtacggtgacaaggcgtnnnactnnntgatagcagttgaaaaactcctagaagcc

SEQ ID NO: 706 - DNA, 58 bp, synthetic construct
  misc_feature 1..58: note = Synthetic Primer
  misc_difference 21..23: note = n is a, c, g, t or u
  misc_difference 27..29: note = n is a, c, g, t or u
  modified_base 20: mod_base = OTHER; note = uracil
  modified_base 33: mod_base = OTHER; note = uracil
  modified_base 40: mod_base = OTHER; note = uracil
  modified_base 45: mod_base = OTHER; note = uracil
  modified_base 55: mod_base = OTHER; note = uracil
  source 1..58: mol_type = other DNA
tctgtacggtgacaaggcgtnnnactnnntgatcagcagtacactaccaacagatcaa

SEQ ID NO: 707 - DNA, 58 bp, synthetic construct
  misc_feature 1..58: note = Synthetic Primer
  misc_difference 21..23: note = n is a, c, g, t or u
  misc_difference 27..29: note = n is a, c, g, t or u
  modified_base 20: mod_base = OTHER; note = uracil
  modified_base 33: mod_base = OTHER; note = uracil
  modified_base 36..37: mod_base = OTHER; note = uracil
  modified_base 44..46: mod_base = OTHER; note = uracil
  modified_base 52: mod_base = OTHER; note = uracil
  source 1..58: mol_type = other DNA
tctgtacggtgacaaggcgtnnnactnnntgatccttaccagctttgacaatacagga

SEQ ID NO: 708 - DNA, 58 bp, synthetic construct
  misc_feature 1..58: note = Synthetic Primer
  misc_difference 21..23: note = n is a, c, g, t or u
  misc_difference 27..29: note = n is a, c, g, t or u
  modified_base 20: mod_base = OTHER; note = uracil
  modified_base 33: mod_base = OTHER; note = uracil
  modified_base 37: mod_base = OTHER; note = uracil
  modified_base 39: mod_base = OTHER; note = uracil
  modified_base 46: mod_base = OTHER; note = uracil
  modified_base 48: mod_base = OTHER; note = uracil
  modified_base 50: mod_base = OTHER; note = uracil
  modified_base 52: mod_base = OTHER; note = uracil
  modified_base 55: mod_base = OTHER; note = uracil
  source 1..58: mol_type = other DNA
tctgtacggtgacaaggcgtnnnactnnntgatgcctctgagaagtatgtctgatcca

SEQ ID NO: 709 - DNA, 58 bp, synthetic construct
  misc_feature 1..58: note = Synthetic Primer
  misc_difference 21..23: note = n is a, c, g, t or u
  misc_difference 27..29: note = n is a, c, g, t or u
  modified_base 20: mod_base = OTHER; note = uracil
  modified_base 33: mod_base = OTHER; note = uracil
  modified_base 40: mod_base = OTHER; note = uracil
  modified_base 46: mod_base = OTHER; note = uracil
  modified_base 57: mod_base = OTHER; note = uracil
  source 1..58: mol_type = other DNA
tctgtacggtgacaaggcgtnnnactnnntgatagaaagtaccaatcagaaggacgtg

SEQ ID NO: 710 - DNA, 58 bp, synthetic construct
  misc_feature 1..58: note = Synthetic Primer
  misc_difference 21..23: note = n is a, c, g, t or u
  misc_difference 27..29: note = n is a, c, g, t or u
  modified_base 20: mod_base = OTHER; note = uracil
  modified_base 33: mod_base = OTHER; note = uracil
  modified_base 35: mod_base = OTHER; note = uracil
  modified_base 47..50: mod_base = OTHER; note = uracil
  source 1..58: mol_type = other DNA
tctgtacggtgacaaggcgtnnnactnnntgatatcagagccagaattttgcagaaga

SEQ ID NO: 711 - DNA, 58 bp, synthetic construct
  misc_feature 1..58: note = Synthetic Primer
  misc_difference 21..23: note = n is a, c, g, t or u
  misc_difference 27..29: note = n is a, c, g, t or u
  modified_base 20: mod_base = OTHER; note = uracil
  modified_base 33..34: mod_base = OTHER; note = uracil
  modified_base 43: mod_base = OTHER; note = uracil
  modified_base 48: mod_base = OTHER; note = uracil
  modified_base 50: mod_base = OTHER; note = uracil
  modified_base 54: mod_base = OTHER; note = uracil
  source 1..58: mol_type = other DNA
tctgtacggtgacaaggcgtnnnactnnntgattcaaccagatgcagtatgagtacac

SEQ ID NO: 712 - DNA, 58 bp, synthetic construct
  misc_feature 1..58: note = Synthetic Primer
  misc_difference 21..23: note = n is a, c, g, t or u
  misc_difference 27..29: note = n is a, c, g, t or u
  modified_base 20: mod_base = OTHER; note = uracil
  modified_base 33..34: mod_base = OTHER; note = uracil
  modified_base 40: mod_base = OTHER; note = uracil
  modified_base 42..43: mod_base = OTHER; note = uracil
  modified_base 45: mod_base = OTHER; note = uracil
  modified_base 48..49: mod_base = OTHER; note = uracil
  modified_base 51: mod_base = OTHER; note = uracil
  modified_base 55: mod_base = OTHER; note = uracil
  source 1..58: mol_type = other DNA
tctgtacggtgacaaggcgtnnnactnnntgattccaagtcttatggttctggatcaa

SEQ ID NO: 713 - DNA, 58 bp, synthetic construct
  misc_feature 1..58: note = Synthetic Primer
  misc_difference 21..23: note = n is a, c, g, t or u
  misc_difference 27..29: note = n is a, c, g, t or u
  modified_base 20: mod_base = OTHER; note = uracil
  modified_base 33: mod_base = OTHER; note = uracil
  modified_base 38: mod_base = OTHER; note = uracil
  modified_base 44: mod_base = OTHER; note = uracil
  modified_base 46: mod_base = OTHER; note = uracil
  modified_base 48: mod_base = OTHER; note = uracil
  modified_base 56: mod_base = OTHER; note = uracil
  source 1..58: mol_type = other DNA
tctgtacggtgacaaggcgtnnnactnnntgatgaagtgaaactgtgtgagaagatgg

SEQ ID NO: 714 - DNA, 58 bp, synthetic construct
  misc_feature 1..58: note = Synthetic Primer
  misc_difference 21..23: note = n is a, c, g, t or u
  misc_difference 27..29: note = n is a, c, g, t or u
  modified_base 20: mod_base = OTHER; note = uracil
  modified_base 33: mod_base = OTHER; note = uracil
  modified_base 35: mod_base = OTHER; note = uracil
  modified_base 37: mod_base = OTHER; note = uracil
  modified_base 39: mod_base = OTHER; note = uracil
  modified_base 43: mod_base = OTHER; note = uracil
  modified_base 52: mod_base = OTHER; note = uracil
  modified_base 54: mod_base = OTHER; note = uracil
  source 1..58: mol_type = other DNA
tctgtacggtgacaaggcgtnnnactnnntgatatgtctaactcgggagactatgaaa

SEQ ID NO: 715 - DNA, 58 bp, synthetic construct
  misc_feature 1..58: note = Synthetic Primer
  misc_difference 21..23: note = n is a, c, g, t or u
  misc_difference 27..29: note = n is a, c, g, t or u
  modified_base 20: mod_base = OTHER; note = uracil
  modified_base 33: mod_base = OTHER; note = uracil
  modified_base 44: mod_base = OTHER; note = uracil
  modified_base 46..48: mod_base = OTHER; note = uracil
  modified_base 51: mod_base = OTHER; note = uracil
  modified_base 53: mod_base = OTHER; note = uracil
  modified_base 56: mod_base = OTHER; note = uracil
  source 1..58: mol_type = other DNA
tctgtacggtgacaaggcgtnnnactnnntgatgaaaagaaactctttcatctgctgc

SEQ ID NO: 716 - DNA, 58 bp, synthetic construct
  misc_feature 1..58: note = Synthetic Primer
  misc_difference 21..23: note = n is a, c, g, t or u
  misc_difference 27..29: note = n is a, c, g, t or u
  modified_base 20: mod_base = OTHER; note = uracil
  modified_base 33: mod_base = OTHER; note = uracil
  modified_base 35: mod_base = OTHER; note = uracil
  modified_base 37: mod_base = OTHER; note = uracil
  modified_base 42..43: mod_base = OTHER; note = uracil
  modified_base 46: mod_base = OTHER; note = uracil
  modified_base 48..51: mod_base = OTHER; note = uracil
  modified_base 57: mod_base = OTHER; note = uracil
  source 1..58: mol_type = other DNA
tctgtacggtgacaaggcgtnnnactnnntgatctctggcgttggtgttttcaaaata

SEQ ID NO: 717 - DNA, 58 bp, synthetic construct
  misc_feature 1..58: note = Synthetic Primer
  misc_difference 21..23: note = n is a, c, g, t or u
  misc_difference 27..29: note = n is a, c, g, t or u
  modified_base 20: mod_base = OTHER; note = uracil
  modified_base 33: mod_base = OTHER; note = uracil
  modified_base 36: mod_base = OTHER; note = uracil
  modified_base 40: mod_base = OTHER; note = uracil
  modified_base 47..48: mod_base = OTHER; note = uracil
  modified_base 52: mod_base = OTHER; note = uracil
  source 1..58: mol_type = other DNA
tctgtacggtgacaaggcgtnnnactnnntgatggtgaataacaacttgagtgacgag

SEQ ID NO: 718 - DNA, 58 bp, synthetic construct
  misc_feature 1..58: note = Synthetic Primer
  misc_difference 21..23: note = n is a, c, g, t or u
  misc_difference 27..29: note = n is a, c, g, t or u
  modified_base 20: mod_base = OTHER; note = uracil
  modified_base 33: mod_base = OTHER; note = uracil
  modified_base 39: mod_base = OTHER; note = uracil
  modified_base 42: mod_base = OTHER; note = uracil
  modified_base 47: mod_base = OTHER; note = uracil
  modified_base 56: mod_base = OTHER; note = uracil
  source 1..58: mol_type = other DNA
tctgtacggtgacaaggcgtnnnactnnntgataaagatgctgaaatccagaagctga

SEQ ID NO: 719 - DNA, 58 bp, synthetic construct
  misc_feature 1..58: note = Synthetic Primer
  misc_difference 21..23: note = n is a, c, g, t or u
  misc_difference 27..29: note = n is a, c, g, t or u
  modified_base 20: mod_base = OTHER; note = uracil
  modified_base 33: mod_base = OTHER; note = uracil
  modified_base 37: mod_base = OTHER; note = uracil
  modified_base 41: mod_base = OTHER; note = uracil
  modified_base 48: mod_base = OTHER; note = uracil
  modified_base 51..52: mod_base = OTHER; note = uracil
  modified_base 56: mod_base = OTHER; note = uracil
  source 1..58: mol_type = other DNA
tctgtacggtgacaaggcgtnnnactnnntgatgactagctgccaagtacttggataa

SEQ ID NO: 720 - DNA, 58 bp, synthetic construct
  misc_feature 1..58: note = Synthetic Primer
  misc_difference 21..23: note = n is a, c, g, t or u
  misc_difference 27..29: note = n is a, c, g, t or u
  modified_base 20: mod_base = OTHER; note = uracil
  modified_base 33: mod_base = OTHER; note = uracil
  modified_base 35: mod_base = OTHER; note = uracil
  modified_base 38: mod_base = OTHER; note = uracil
  modified_base 41: mod_base = OTHER; note = uracil
  modified_base 43..45: mod_base = OTHER; note = uracil
  modified_base 48..50: mod_base = OTHER; note = uracil
  modified_base 54: mod_base = OTHER; note = uracil
  source 1..58: mol_type = other DNA
tctgtacggtgacaaggcgtnnnactnnntgatataatgctgtttcctttacctggga

SEQ ID NO: 721 - DNA, 58 bp, synthetic construct
  misc_feature 1..58: note = Synthetic Primer
  misc_difference 21..23: note = n is a, c, g, t or u
  misc_difference 27..29: note = n is a, c, g, t or u
  modified_base 20: mod_base = OTHER; note = uracil
  modified_base 33: mod_base = OTHER; note = uracil
  modified_base 37: mod_base = OTHER; note = uracil
  modified_base 45: mod_base = OTHER; note = uracil
  modified_base 47: mod_base = OTHER; note = uracil
  source 1..58: mol_type = other DNA
tctgtacggtgacaaggcgtnnnactnnntgataggtcaaagaatatggccagaagag

SEQ ID NO: 722 - DNA, 58 bp, synthetic construct
  misc_feature 1..58: note = Synthetic Primer
  misc_difference 21..23: note = n is a, c, g, t or u
  misc_difference 27..29: note = n is a, c, g, t or u
  modified_base 20: mod_base = OTHER; note = uracil
  modified_base 33: mod_base = OTHER; note = uracil
  modified_base 35: mod_base = OTHER; note = uracil
  modified_base 47: mod_base = OTHER; note = uracil
  source 1..58: mol_type = other DNA
tctgtacggtgacaaggcgtnnnactnnntgatgtaaaccaacagctcacaaaggaga

SEQ ID NO: 723 - DNA, 58 bp, synthetic construct
  misc_feature 1..58: note = Synthetic Primer
  misc_difference 21..23: note = n is a, c, g, t or u
  misc_difference 27..29: note = n is a, c, g, t or u
  modified_base 20: mod_base = OTHER; note = uracil
  modified_base 33..35: mod_base = OTHER; note = uracil
  modified_base 44: mod_base = OTHER; note = uracil
  source 1..58: mol_type = other DNA
tctgtacggtgacaaggcgtnnnactnnntgatttgaagagcatcaacaagaagacca

SEQ ID NO: 724 - DNA, 58 bp, synthetic construct
  misc_feature 1..58: note = Synthetic Primer
  misc_difference 21..23: note = n is a, c, g, t or u
  misc_difference 27..29: note = n is a, c, g, t or u
  modified_base 20: mod_base = OTHER; note = uracil
  modified_base 33: mod_base = OTHER; note = uracil
  modified_base 35..36: mod_base = OTHER; note = uracil
  modified_base 41: mod_base = OTHER; note = uracil
  modified_base 47: mod_base = OTHER; note = uracil
  modified_base 51: mod_base = OTHER; note = uracil
  source 1..58: mol_type = other DNA
tctgtacggtgacaaggcgtnnnactnnntgatcttgaaatccgcctgaatgaacaag

SEQ ID NO: 725 - DNA, 58 bp, synthetic construct
  misc_feature 1..58: note = Synthetic Primer
  misc_difference 21..23: note = n is a, c, g, t or u
  misc_difference 27..29: note = n is a, c, g, t or u
  modified_base 20: mod_base = OTHER; note = uracil
  modified_base 33..34: mod_base = OTHER; note = uracil
  modified_base 36..37: mod_base = OTHER; note = uracil
  modified_base 42..43: mod_base = OTHER; note = uracil
  modified_base 48: mod_base = OTHER; note = uracil
  modified_base 50: mod_base = OTHER; note = uracil
  modified_base 53..54: mod_base = OTHER; note = uracil
  source 1..58: mol_type = other DNA
tctgtacggtgacaaggcgtnnnactnnntgattcttaaggttgaagtgtggttcagg

SEQ ID NO: 726 - DNA, 58 bp, synthetic construct
  misc_feature 1..58: note = Synthetic Primer
  misc_difference 21..23: note = n is a, c, g, t or u
  misc_difference 27..29: note = n is a, c, g, t or u
  modified_base 20: mod_base = OTHER; note = uracil
  modified_base 33..37: mod_base = OTHER; note = uracil
  modified_base 39..41: mod_base = OTHER; note = uracil
  modified_base 43: mod_base = OTHER; note = uracil
  source 1..58: mol_type = other DNA
tctgtacggtgacaaggcgtnnnactnnntgatttttctttctcagaaagcagaggct

SEQ ID NO: 727 - DNA, 58 bp, synthetic construct
  misc_feature 1..58: note = Synthetic Primer
  misc_difference 21..23: note = n is a, c, g, t or u
  misc_difference 27..29: note = n is a, c, g, t or u
  modified_base 20: mod_base = OTHER; note = uracil
  modified_base 33: mod_base = OTHER; note = uracil
  modified_base 36: mod_base = OTHER; note = uracil
  modified_base 38: mod_base = OTHER; note = uracil
  modified_base 44: mod_base = OTHER; note = uracil
  modified_base 53: mod_base = OTHER; note = uracil
  modified_base 55: mod_base = OTHER; note = uracil
  source 1..58: mol_type = other DNA
tctgtacggtgacaaggcgtnnnactnnntgatagtatcaacatcacggacatctcaa

SEQ ID NO: 728 - DNA, 58 bp, synthetic construct
  misc_feature 1..58: note = Synthetic Primer
  misc_difference 21..23: note = n is a, c, g, t or u
  misc_difference 27..29: note = n is a, c, g, t or u
  modified_base 20: mod_base = OTHER; note = uracil
  modified_base 33: mod_base = OTHER; note = uracil
  modified_base 36: mod_base = OTHER; note = uracil
  modified_base 38: mod_base = OTHER; note = uracil
  modified_base 44: mod_base = OTHER; note = uracil
  modified_base 56: mod_base = OTHER; note = uracil
  source 1..58: mol_type = other DNA
tctgtacggtgacaaggcgtnnnactnnntgatcctctaaagatcaaaacacccctgt

SEQ ID NO: 729 - DNA, 58 bp, synthetic construct
  misc_feature 1..58: note = Synthetic Primer
  misc_difference 21..23: note = n is a, c, g, t or u
  misc_difference 27..29: note = n is a, c, g, t or u
  modified_base 20: mod_base = OTHER; note = uracil
  modified_base 33..34: mod_base = OTHER; note = uracil
  modified_base 43: mod_base = OTHER; note = uracil
  modified_base 47: mod_base = OTHER; note = uracil
  modified_base 49: mod_base = OTHER; note = uracil
  modified_base 51: mod_base = OTHER; note = uracil
  modified_base 53: mod_base = OTHER; note = uracil
  source 1..58: mol_type = other DNA
tctgtacggtgacaaggcgtnnnactnnntgattagaacgagtaaatctgtctgcagc

SEQ ID NO: 730 - DNA, 58 bp, synthetic construct
  misc_feature 1..58: note = Synthetic Primer
  misc_difference 21..23: note = n is a, c, g, t or u
  misc_difference 27..29: note = n is a, c, g, t or u
  modified_base 20: mod_base = OTHER; note = uracil
  modified_base 33..34: mod_base = OTHER; note = uracil
  modified_base 37: mod_base = OTHER; note = uracil
  modified_base 40: mod_base = OTHER; note = uracil
  modified_base 43..44: mod_base = OTHER; note = uracil
  modified_base 55..56: mod_base = OTHER; note = uracil
  source 1..58: mol_type = other DNA
tctgtacggtgacaaggcgtnnnactnnntgattcatcgtgattcaggagacaattct

SEQ ID NO: 731 - DNA, 58 bp, synthetic construct
  misc_feature 1..58: note = Synthetic Primer
  misc_difference 21..23: note = n is a, c, g, t or u
  misc_difference 27..29: note = n is a, c, g, t or u
  modified_base 20: mod_base = OTHER; note = uracil
  modified_base 33: mod_base = OTHER; note = uracil
  modified_base 37: mod_base = OTHER; note = uracil
  modified_base 39..41: mod_base = OTHER; note = uracil
  modified_base 43: mod_base = OTHER; note = uracil
  modified_base 46: mod_base = OTHER; note = uracil
  modified_base 48..49: mod_base = OTHER; note = uracil
  modified_base 51: mod_base = OTHER; note = uracil
  modified_base 55: mod_base = OTHER; note = uracil
  source 1..58: mol_type = other DNA
tctgtacggtgacaaggcgtnnnactnnntgatagctgtttctggtgttatcagtgac

SEQ ID NO: 732 - DNA, 58 bp, synthetic construct
  misc_feature 1..58: note = Synthetic Primer
  misc_difference 21..23: note = n is a, c, g, t or u
  misc_difference 27..29: note = n is a, c, g, t or u
  modified_base 20: mod_base = OTHER; note = uracil
  modified_base 33..34: mod_base = OTHER; note = uracil
  modified_base 38: mod_base = OTHER; note = uracil
  modified_base 44: mod_base = OTHER; note = uracil
  modified_base 55..56: mod_base = OTHER; note = uracil
  source 1..58: mol_type = other DNA
tctgtacggtgacaaggcgtnnnactnnntgattacatggcactagaagaacgcttag

SEQ ID NO: 733 - DNA, 58 bp, synthetic construct
  misc_feature 1..58: note = Synthetic Primer
  misc_difference 21..23: note = n is a, c, g, t or u
  misc_difference 27..29: note = n is a, c, g, t or u
  modified_base 20: mod_base = OTHER; note = uracil
  modified_base 33: mod_base = OTHER; note = uracil
  modified_base 45: mod_base = OTHER; note = uracil
  modified_base 47: mod_base = OTHER; note = uracil
  modified_base 52..53: mod_base = OTHER; note = uracil
  modified_base 55: mod_base = OTHER; note = uracil
  source 1..58: mol_type = other DNA
tctgtacggtgacaaggcgtnnnactnnntgatgcaaagacaaatgtgaaattgtggg

SEQ ID NO: 734 - DNA, 58 bp, synthetic construct
  misc_feature 1..58: note = Synthetic Primer
  misc_difference 21..23: note = n is a, c, g, t or u
  misc_difference 27..29: note = n is a, c, g, t or u
  modified_base 20: mod_base = OTHER; note = uracil
  modified_base 33: mod_base = OTHER; note = uracil
  modified_base 40..41: mod_base = OTHER; note = uracil
  modified_base 44..45: mod_base = OTHER; note = uracil
  modified_base 48: mod_base = OTHER; note = uracil
  modified_base 54: mod_base = OTHER; note = uracil
  source 1..58: mol_type = other DNA
tctgtacggtgacaaggcgtnnnactnnntgataacacattcattcataacactggga

SEQ ID NO: 735 - DNA, 58 bp, synthetic construct
  misc_feature 1..58: note = Synthetic Primer
  misc_difference 21..23: note = n is a, c, g, t or u
  misc_difference 27..29: note = n is a, c, g, t or u
  modified_base 20: mod_base = OTHER; note = uracil
  modified_base 33: mod_base = OTHER; note = uracil
  modified_base 35..36: mod_base = OTHER; note = uracil
  modified_base 39: mod_base = OTHER; note = uracil
  modified_base 48..50: mod_base = OTHER; note = uracil
  modified_base 52: mod_base = OTHER; note = uracil
  modified_base 54: mod_base = OTHER; note = uracil
  modified_base 57: mod_base = OTHER; note = uracil
  source 1..58: mol_type = other DNA
tctgtacggtgacaaggcgtnnnactnnntgatcttaatcagcaagctttctctgctg

SEQ ID NO: 736 - DNA, 58 bp, synthetic construct
  misc_feature 1..58: note = Synthetic Primer
  misc_difference 21..23: note = n is a, c, g, t or u
  misc_difference 27..29: note = n is a, c, g, t or u
  modified_base 20: mod_base = OTHER; note = uracil
  modified_base 33: mod_base = OTHER; note = uracil
  modified_base 38: mod_base = OTHER; note = uracil
  modified_base 47..48: mod_base = OTHER; note = uracil
  modified_base 50..51: mod_base = OTHER; note = uracil
  modified_base 54: mod_base = OTHER; note = uracil
  source 1..58: mol_type = other DNA
tctgtacggtgacaaggcgtnnnactnnntgatgagatgcaagcagttattgatgcaa

SEQ ID NO: 737 - DNA, 58 bp, synthetic construct
  misc_feature 1..58: note = Synthetic Primer
  misc_difference 21..23: note = n is a, c, g, t or u
  misc_difference 27..29: note = n is a, c, g, t or u
  modified_base 20: mod_base = OTHER; note = uracil
  modified_base 33: mod_base = OTHER; note = uracil
  modified_base 35: mod_base = OTHER; note = uracil
  modified_base 49: mod_base = OTHER; note = uracil
  modified_base 53: mod_base = OTHER; note = uracil
  modified_base 55: mod_base = OTHER; note = uracil
  source 1..58: mol_type = other DNA
tctgtacggtgacaaggcgtnnnactnnntgatatagcaagaaggaagtgcctatcca

SEQ ID NO: 738 - DNA, 58 bp, synthetic construct
  misc_feature 1..58: note = Synthetic Primer
  misc_difference 21..23: note = n is a, c, g, t or u
  misc_difference 27..29: note = n is a, c, g, t or u
  modified_base 20: mod_base = OTHER; note = uracil
  modified_base 33..34: mod_base = OTHER; note = uracil
  modified_base 43: mod_base = OTHER; note = uracil
  modified_base 46..48: mod_base = OTHER; note = uracil
  source 1..58: mol_type = other DNA
tctgtacggtgacaaggcgtnnnactnnntgattcccacagctaatttggaccaaaag

SEQ ID NO: 739 - DNA, 58 bp, synthetic construct
  misc_feature 1..58: note = Synthetic Primer
  misc_difference 21..23: note = n is a, c, g, t or u
  misc_difference 27..29: note = n is a, c, g, t or u
  modified_base 20: mod_base = OTHER; note = uracil
  modified_base 33: mod_base = OTHER; note = uracil
  modified_base 35..37: mod_base = OTHER; note = uracil
  modified_base 39..40: mod_base = OTHER; note = uracil
  modified_base 43: mod_base = OTHER; note = uracil
  modified_base 45..46: mod_base = OTHER; note = uracil
  modified_base 48: mod_base = OTHER; note = uracil
  modified_base 50..52: mod_base = OTHER; note = uracil
  source 1..58: mol_type = other DNA
tctgtacggtgacaaggcgtnnnactnnntgatgtttcttcgtcttatctttgggacc

SEQ ID NO: 740 - DNA, 58 bp, synthetic construct
  misc_feature 1..58: note = Synthetic Primer
  misc_difference 21..23: note = n is a, c, g, t or u
  misc_difference 27..29: note = n is a, c, g, t or u
  modified_base 20: mod_base = OTHER; note = uracil
  modified_base 33: mod_base = OTHER; note = uracil
  modified_base 47..49: mod_base = OTHER; note = uracil
  modified_base 51..52: mod_base = OTHER; note = uracil
  modified_base 56: mod_base = OTHER; note = uracil
  source 1..58: mol_type = other DNA
tctgtacggtgacaaggcgtnnnactnnntgatcaggaagccagagtttattaactgc

SEQ ID NO: 741 - DNA, 58 bp, synthetic construct
  misc_feature 1..58: note = Synthetic Primer
  misc_difference 21..23: note = n is a, c, g, t or u
  misc_difference 27..29: note = n is a, c, g, t or u
  modified_base 20: mod_base = OTHER; note = uracil
  modified_base 33: mod_base = OTHER; note = uracil
  modified_base 37: mod_base = OTHER; note = uracil
  modified_base 52: mod_base = OTHER; note = uracil
  source 1..58: mol_type = other DNA
tctgtacggtgacaaggcgtnnnactnnntgatagatgagaagaagcaccatgacaat

SEQ ID NO: 742 - DNA, 58 bp, synthetic construct
  misc_feature 1..58: note = Synthetic Primer
  misc_difference 21..23: note = n is a, c, g, t or u
  misc_difference 27..29: note = n is a, c, g, t or u
  modified_base 20: mod_base = OTHER; note = uracil
  modified_base 33: mod_base = OTHER; note = uracil
  modified_base 40: mod_base = OTHER; note = uracil
  modified_base 45..46: mod_base = OTHER; note = uracil
  source 1..58: mol_type = other DNA
tctgtacggtgacaaggcgtnnnactnnntgatagagggtaaagttcacaaaagacca

SEQ ID NO: 743 - DNA, 58 bp, synthetic construct
  misc_feature 1..58: note = Synthetic Primer
  misc_difference 21..23: note = n is a, c, g, t or u
  misc_difference 27..29: note = n is a, c, g, t or u
  modified_base 20: mod_base = OTHER; note = uracil
  modified_base 33: mod_base = OTHER; note = uracil
  modified_base 42: mod_base = OTHER; note = uracil
  modified_base 44: mod_base = OTHER; note = uracil
  modified_base 48: mod_base = OTHER; note = uracil
  modified_base 51: mod_base = OTHER; note = uracil
  source 1..58: mol_type = other DNA
tctgtacggtgacaaggcgtnnnactnnntgatgccaaaaatgtgcatactcacagag

SEQ ID NO: 744 - DNA, 58 bp, synthetic construct
  misc_feature 1..58: note = Synthetic Primer
  misc_difference 21..23: note = n is a, c, g, t or u
  misc_difference 27..29: note = n is a, c, g, t or u
  modified_base 20: mod_base = OTHER; note = uracil
  modified_base 33..34: mod_base = OTHER; note = uracil
  modified_base 36: mod_base = OTHER; note = uracil
  modified_base 38: mod_base = OTHER; note = uracil
  modified_base 41: mod_base = OTHER; note = uracil
  modified_base 43: mod_base = OTHER; note = uracil
  modified_base 46: mod_base = OTHER; note = uracil
  modified_base 56: mod_base = OTHER; note = uracil
  source 1..58: mol_type = other DNA
tctgtacggtgacaaggcgtnnnactnnntgattgtatcatctcctgaagcaacatct

SEQ ID NO: 745 - DNA, 58 bp, synthetic construct
  misc_feature 1..58: note = Synthetic Primer
  misc_difference 21..23: note = n is a, c, g, t or u
  misc_difference 27..29: note = n is a, c, g, t or u
  modified_base 20: mod_base = OTHER; note = uracil
  modified_base 33: mod_base = OTHER; note = uracil
  modified_base 36: mod_base = OTHER; note = uracil
  modified_base 40: mod_base = OTHER; note = uracil
  modified_base 43: mod_base = OTHER; note = uracil
  modified_base 51: mod_base = OTHER; note = uracil
  modified_base 54..55: mod_base = OTHER; note = uracil
  source 1..58: mol_type = other DNA
tctgtacggtgacaaggcgtnnnactnnntgatcctggataatgaaagactccttccc

SEQ ID NO: 746 - DNA, 58 bp, synthetic construct
  misc_feature 1..58: note = Synthetic Primer
  misc_difference 21..23: note = n is a, c, g, t or u
  misc_difference 27..29: note = n is a, c, g, t or u
  modified_base 20: mod_base = OTHER; note = uracil
  modified_base 33..34: mod_base = OTHER; note = uracil
  modified_base 39: mod_base = OTHER; note = uracil
  modified_base 44: mod_base = OTHER; note = uracil
  modified_base 56: mod_base = OTHER; note = uracil
  source 1..58: mol_type = other DNA
tctgtacggtgacaaggcgtnnnactnnntgattcagatagcatacaagagaccatgc

SEQ ID NO: 747 - DNA, 59 bp, synthetic construct
  misc_feature 1..59: note = Synthetic Primer
  misc_difference 21..23: note = n is a, c, g, t or u
  misc_difference 27..29: note = n is a, c, g, t or u
  modified_base 20: mod_base = OTHER; note = uracil
  modified_base 33: mod_base = OTHER; note = uracil
  modified_base 35: mod_base = OTHER; note = uracil
  modified_base 38: mod_base = OTHER; note = uracil
  modified_base 40: mod_base = OTHER; note = uracil
  modified_base 42..46: mod_base = OTHER; note = uracil
  modified_base 50..52: mod_base = OTHER; note = uracil
  modified_base 54: mod_base = OTHER; note = uracil
  source 1..59: mol_type = other DNA
tctgtacggtgacaaggcgtnnnactnnntgatgtgatctatttttccctttctcccca

SEQ ID NO: 748 - DNA, 59 bp, synthetic construct
  misc_feature 1..59: note = Synthetic Primer
  misc_difference 21..23: note = n is a, c, g, t or u
  misc_difference 27..29: note = n is a, c, g, t or u
  modified_base 20: mod_base = OTHER; note = uracil
  modified_base 33: mod_base = OTHER; note = uracil
  modified_base 44..46: mod_base = OTHER; note = uracil
  modified_base 51: mod_base = OTHER; note = uracil
  modified_base 53..55: mod_base = OTHER; note = uracil
  modified_base 58: mod_base = OTHER; note = uracil
  source 1..59: mol_type = other DNA
tctgtacggtgacaaggcgtnnnactnnntgatagcaagaggctttggagtatttcatg

SEQ ID NO: 749 - DNA, 59 bp, synthetic construct
  misc_feature 1..59: note = Synthetic Primer
  misc_difference 21..23: note = n is a, c, g, t or u
  misc_difference 27..29: note = n is a, c, g, t or u
  modified_base 20: mod_base = OTHER; note = uracil
  modified_base 33: mod_base = OTHER; note = uracil
  modified_base 39: mod_base = OTHER; note = uracil
  modified_base 42: mod_base = OTHER; note = uracil
  modified_base 49: mod_base = OTHER; note = uracil
  modified_base 51: mod_base = OTHER; note = uracil
  modified_base 56: mod_base = OTHER; note = uracil
  source 1..59: mol_type = other DNA
tctgtacggtgacaaggcgtnnnactnnntgatacaaatgctgaaagctgtaccatacc

SEQ ID NO: 750 - DNA, 59 bp, synthetic construct
  misc_feature 1..59: note = Synthetic Primer
  misc_difference 21..23: note = n is a, c, g, t or u
  misc_difference 27..29: note = n is a, c, g, t or u
  modified_base 20: mod_base = OTHER; note = uracil
  modified_base 33: mod_base = OTHER; note = uracil
  modified_base 36: mod_base = OTHER; note = uracil
  modified_base 40: mod_base = OTHER; note = uracil
  modified_base 44: mod_base = OTHER; note = uracil
  modified_base 47: mod_base = OTHER; note = uracil
  modified_base 49..50: mod_base = OTHER; note = uracil
  modified_base 58: mod_base = OTHER; note = uracil
  source 1..59: mol_type = other DNA
tctgtacggtgacaaggcgtnnnactnnntgatactaggtgaatactgttcgagaggtt

SEQ ID NO: 751 - DNA, 59 bp, synthetic construct
  misc_feature 1..59: note = Synthetic Primer
  misc_difference 21..23: note = n is a, c, g, t or u
  misc_difference 27..29: note = n is a, c, g, t or u
  modified_base 20: mod_base = OTHER; note = uracil
  modified_base 33: mod_base = OTHER; note = uracil
  modified_base 35: mod_base = OTHER; note = uracil
  modified_base 39: mod_base = OTHER; note = uracil
  modified_base 43..45: mod_base = OTHER; note = uracil
  modified_base 53: mod_base = OTHER; note = uracil
  source 1..59: mol_type = other DNA
tctgtacggtgacaaggcgtnnnactnnntgatctccatgcctttgagaacctagaaat

SEQ ID NO: 752 - DNA, 59 bp, synthetic construct
  misc_feature 1..59: note = Synthetic Primer
  misc_difference 21..23: note = n is a, c, g, t or u
  misc_difference 27..29: note = n is a, c, g, t or u
  modified_base 20: mod_base = OTHER; note = uracil
  modified_base 33..35: mod_base = OTHER; note = uracil
  modified_base 46: mod_base = OTHER; note = uracil
  modified_base 48: mod_base = OTHER; note = uracil
  modified_base 50..51: mod_base = OTHER; note = uracil
  modified_base 56: mod_base = OTHER; note = uracil
  source 1..59: mol_type = other DNA
tctgtacggtgacaaggcgtnnnactnnntgatttcaaaaggaagtatcttggcctcca

SEQ ID NO: 753 - DNA, 59 bp, synthetic construct
  misc_feature 1..59: note = Synthetic Primer
  misc_difference 21..23: note = n is a, c, g, t or u
  misc_difference 27..29: note = n is a, c, g, t or u
  modified_base 20: mod_base = OTHER; note = uracil
  modified_base 33: mod_base = OTHER; note = uracil
  modified_base 37: mod_base = OTHER; note = uracil
  modified_base 40: mod_base = OTHER; note = uracil
  modified_base 42..43: mod_base = OTHER; note = uracil
  modified_base 51..52: mod_base = OTHER; note = uracil
  modified_base 56: mod_base = OTHER; note = uracil
  modified_base 58: mod_base = OTHER; note = uracil
  source 1..59: mol_type = other DNA
tctgtacggtgacaaggcgtnnnactnnntgatcaatcatgttgcagcaattcactgta

SEQ ID NO: 754 - DNA, 59 bp, synthetic construct
  misc_feature 1..59: note = Synthetic Primer
  misc_difference 21..23: note = n is a, c, g, t or u
  misc_difference 27..29: note = n is a, c, g, t or u
  modified_base 20: mod_base = OTHER; note = uracil
  modified_base 33: mod_base = OTHER; note = uracil
  modified_base 37..39: mod_base = OTHER; note = uracil
  modified_base 44: mod_base = OTHER; note = uracil
  modified_base 46: mod_base = OTHER; note = uracil
  modified_base 49: mod_base = OTHER; note = uracil
  modified_base 52: mod_base = OTHER; note = uracil
  modified_base 56: mod_base = OTHER; note = uracil
  source 1..59: mol_type = other DNA
tctgtacggtgacaaggcgtnnnactnnntgatcactttaccctgtaataatccgtgct

SEQ ID NO: 755 - DNA, 59 bp, synthetic construct
  misc_feature 1..59: note = Synthetic Primer
  misc_difference 21..23: note = n is a, c, g, t or u
  misc_difference 27..29: note = n is a, c, g, t or u
  modified_base 20: mod_base = OTHER; note = uracil
  modified_base 33: mod_base = OTHER; note = uracil
  modified_base 37: mod_base = OTHER; note = uracil
  modified_base 40: mod_base = OTHER; note = uracil
  modified_base 46: mod_base = OTHER; note = uracil
  modified_base 51: mod_base = OTHER; note = uracil
  modified_base 53: mod_base = OTHER; note = uracil
  modified_base 56: mod_base = OTHER; note = uracil
  modified_base 58: mod_base = OTHER; note = uracil
  source 1..59: mol_type = other DNA
tctgtacggtgacaaggcgtnnnactnnntgatcagtgatgagagtgacatgtactgtt

SEQ ID NO: 756 - DNA, 59 bp, synthetic construct
  misc_feature 1..59: note = Synthetic Primer
  misc_difference 21..23: note = n is a, c, g, t or u
  misc_difference 27..29: note = n is a, c, g, t or u
  modified_base 20: mod_base = OTHER; note = uracil
  modified_base 33: mod_base = OTHER; note = uracil
  modified_base 37: mod_base = OTHER; note = uracil
  modified_base 46: mod_base = OTHER; note = uracil
  modified_base 48: mod_base = OTHER; note = uracil
  modified_base 54..55: mod_base = OTHER; note = uracil
  source 1..59: mol_type = other DNA
tctgtacggtgacaaggcgtnnnactnnntgatgagtcccaaccatgtcaaaattacag

SEQ ID NO: 757 - DNA, 59 bp, synthetic construct
  misc_feature 1..59: note = Synthetic Primer
  misc_difference 21..23: note = n is a, c, g, t or u
  misc_difference 27..29: note = n is a, c, g, t or u
  modified_base 20: mod_base = OTHER; note = uracil
  modified_base 33: mod_base = OTHER; note = uracil
  modified_base 35..36: mod_base = OTHER; note = uracil
  modified_base 44: mod_base = OTHER; note = uracil
  modified_base 48..49: mod_base = OTHER; note = uracil
  modified_base 52..53: mod_base = OTHER; note = uracil
  modified_base 56: mod_base = OTHER; note = uracil
  source 1..59: mol_type = other DNA
tctgtacggtgacaaggcgtnnnactnnntgatattgccaacatgacttacttgatccc

SEQ ID NO: 758 - DNA, 59 bp, synthetic construct
  misc_feature 1..59: note = Synthetic Primer
  misc_difference 21..23: note = n is a, c, g, t or u
  misc_difference 27..29: note = n is a, c, g, t or u
  modified_base 20: mod_base = OTHER; note = uracil
  modified_base 33..35: mod_base = OTHER; note = uracil
  modified_base 40: mod_base = OTHER; note = uracil
  modified_base 42..43: mod_base = OTHER; note = uracil
  modified_base 48: mod_base = OTHER; note = uracil
  modified_base 52..54: mod_base = OTHER; note = uracil
  modified_base 56..58: mod_base = OTHER; note = uracil
  source 1..59: mol_type = other DNA
tctgtacggtgacaaggcgtnnnactnnntgatttaccctcttcagctcagtttctttc

SEQ ID NO: 759 - DNA, 59 bp, synthetic construct
  misc_feature 1..59: note = Synthetic Primer
  misc_difference 21..23: note = n is a, c, g, t or u
  misc_difference 27..29: note = n is a, c, g, t or u
  modified_base 20: mod_base = OTHER; note = uracil
  modified_base 33: mod_base = OTHER; note = uracil
  modified_base 36: mod_base = OTHER; note = uracil
  modified_base 41: mod_base = OTHER; note = uracil
  modified_base 45..46: mod_base = OTHER; note = uracil
  modified_base 51: mod_base = OTHER; note = uracil
  modified_base 55..58: mod_base = OTHER; note = uracil
  source 1..59: mol_type = other DNA
tctgtacggtgacaaggcgtnnnactnnntgatggtgagatccattgacctcaattttg

SEQ ID NO: 760 - DNA, 59 bp, synthetic construct
  misc_feature 1..59: note = Synthetic Primer
  misc_difference 21..23: note = n is a, c, g, t or u
  misc_difference 27..29: note = n is a, c, g, t or u
  modified_base 20: mod_base = OTHER; note = uracil
  modified_base 33: mod_base = OTHER; note = uracil
  modified_base 36: mod_base = OTHER; note = uracil
  modified_base 48..50: mod_base = OTHER; note = uracil
  modified_base 53: mod_base = OTHER; note = uracil
  modified_base 57: mod_base = OTHER; note = uracil
  source 1..59: mol_type = other DNA
tctgtacggtgacaaggcgtnnnactnnntgatggtggaccccaagctttagtaaatat

SEQ ID NO: 761 - DNA, 59 bp, synthetic construct
  misc_feature 1..59: note = Synthetic Primer
  misc_difference 21..23: note = n is a, c, g, t or u
  misc_difference 27..29: note = n is a, c, g, t or u
  modified_base 20: mod_base = OTHER; note = uracil
  modified_base 33: mod_base = OTHER; note = uracil
  modified_base 37: mod_base = OTHER; note = uracil
  modified_base 44: mod_base = OTHER; note = uracil
  modified_base 48: mod_base = OTHER; note = uracil
  modified_base 53..54: mod_base = OTHER; note = uracil
  modified_base 56..57: mod_base = OTHER; note = uracil
  source 1..59: mol_type = other DNA
tctgtacggtgacaaggcgtnnnactnnntgataaataccccctccatcaacttcttca

SEQ ID NO: 762 - DNA, 59 bp, synthetic construct
  misc_feature 1..59: note = Synthetic Primer
  misc_difference 21..23: note = n is a, c, g, t or u
  misc_difference 27..29: note = n is a, c, g, t or u
  modified_base 20: mod_base = OTHER; note = uracil
  modified_base 33: mod_base = OTHER; note = uracil
  modified_base 35..36: mod_base = OTHER; note = uracil
  modified_base 44: mod_base = OTHER; note = uracil
  modified_base 49: mod_base = OTHER; note = uracil
  modified_base 54: mod_base = OTHER; note = uracil
  source 1..59: mol_type = other DNA
tctgtacggtgacaaggcgtnnnactnnntgatattagagaactaccctggaatgaccc

SEQ ID NO: 763 - DNA, 59 bp, synthetic construct
  misc_feature 1..59: note = Synthetic Primer
  misc_difference 21..23: note = n is a, c, g, t or u
  misc_difference 27..29: note = n is a, c, g, t or u
  modified_base 20: mod_base = OTHER; note = uracil
  modified_base 33: mod_base = OTHER; note = uracil
  modified_base 36..37: mod_base = OTHER; note = uracil
  modified_base 40..41: mod_base = OTHER; note = uracil
  modified_base 45: mod_base = OTHER; note = uracil
  modified_base 53..54: mod_base = OTHER; note = uracil
  modified_base 56..57: mod_base = OTHER; note = uracil
  source 1..59: mol_type = other DNA
tctgtacggtgacaaggcgtnnnactnnntgatccttgcttacctgaggaacttattca

SEQ ID NO: 764 - DNA, 59 bp, synthetic construct
  misc_feature 1..59: note = Synthetic Primer
  misc_difference 21..23: note = n is a, c, g, t or u
  misc_difference 27..29: note = n is a, c, g, t or u
  modified_base 20: mod_base = OTHER; note = uracil
  modified_base 33: mod_base = OTHER; note = uracil
  modified_base 39..40: mod_base = OTHER; note = uracil
  modified_base 44: mod_base = OTHER; note = uracil
  modified_base 47..48: mod_base = OTHER; note = uracil
  modified_base 53: mod_base = OTHER; note = uracil
  source 1..59: mol_type = other DNA
tctgtacggtgacaaggcgtnnnactnnntgatccacattacatacttaccatgccact

SEQ ID NO: 765 - DNA, 59 bp, synthetic construct
  misc_feature 1..59: note = Synthetic Primer
  misc_difference 21..23: note = n is a, c, g, t or u
  misc_difference 27..29: note = n is a, c, g, t or u
  modified_base 20: mod_base = OTHER; note = uracil
  modified_base 33: mod_base = OTHER; note = uracil
  modified_base 41: mod_base = OTHER; note = uracil
  modified_base 43: mod_base = OTHER; note = uracil
  modified_base 47: mod_base = OTHER; note = uracil
  modified_base 51: mod_base = OTHER; note = uracil
  modified_base 53: mod_base = OTHER; note = uracil
  modified_base 57..58: mod_base = OTHER; note = uracil
  source 1..59: mol_type = other DNA
tctgtacggtgacaaggcgtnnnactnnntgatgggaagctgtccatcagtatacattc

SEQ ID NO: 766 - DNA, 59 bp, synthetic construct
  misc_feature 1..59: note = Synthetic Primer
  misc_difference 21..23: note = n is a, c, g, t or u
  misc_difference 27..29: note = n is a, c, g, t or u
  modified_base 20: mod_base = OTHER; note = uracil
  modified_base 33: mod_base = OTHER; note = uracil
  modified_base 36..37: mod_base = OTHER; note = uracil
  modified_base 39..40: mod_base = OTHER; note = uracil
  modified_base 42: mod_base = OTHER; note = uracil
  modified_base 47: mod_base = OTHER; note = uracil
  modified_base 49..51: mod_base = OTHER; note = uracil
  modified_base 55: mod_base = OTHER; note = uracil
  modified_base 57: mod_base = OTHER; note = uracil
  source 1..59: mol_type = other DNA
tctgtacggtgacaaggcgtnnnactnnntgatcattattgtggcctgtttgactctgt

SEQ ID NO: 767 - DNA, 59 bp, synthetic construct
  misc_feature 1..59: note = Synthetic Primer
  misc_difference 21..23: note = n is a, c, g, t or u
  misc_difference 27..29: note = n is a, c, g, t or u
  modified_base 20: mod_base = OTHER; note = uracil
  modified_base 33..34: mod_base = OTHER; note = uracil
  modified_base 38: mod_base = OTHER; note = uracil
  modified_base 40..42: mod_base = OTHER; note = uracil
  modified_base 45..46: mod_base = OTHER; note = uracil
  modified_base 52: mod_base = OTHER; note = uracil
  modified_base 54: mod_base = OTHER; note = uracil
  source 1..59: mol_type = other DNA
tctgtacggtgacaaggcgtnnnactnnntgattgactctttacttcaaactctgagcc

SEQ ID NO: 768 - DNA, 59 bp, synthetic construct
  misc_feature 1..59: note = Synthetic Primer
  misc_difference 21..23: note = n is a, c, g, t or u
  misc_difference 27..29: note = n is a, c, g, t or u
  modified_base 20: mod_base = OTHER; note = uracil
  modified_base 33: mod_base = OTHER; note = uracil
  modified_base 35: mod_base = OTHER; note = uracil
  modified_base 38: mod_base = OTHER; note = uracil
  modified_base 40..41: mod_base = OTHER; note = uracil
  modified_base 48: mod_base = OTHER; note = uracil
  modified_base 50..51: mod_base = OTHER; note = uracil
  modified_base 53: mod_base = OTHER; note = uracil
  source 1..59: mol_type = other DNA
tctgtacggtgacaaggcgtnnnactnnntgatgtcgtcttcggaaatgttatgaagca

SEQ ID NO: 769 - DNA, 59 bp, synthetic construct
  misc_feature 1..59: note = Synthetic Primer
  misc_difference 21..23: note = n is a, c, g, t or u
  misc_difference 27..29: note = n is a, c, g, t or u
  modified_base 20: mod_base = OTHER; note = uracil
  modified_base 33: mod_base = OTHER; note = uracil
  modified_base 41: mod_base = OTHER; note = uracil
  modified_base 44: mod_base = OTHER; note = uracil
  modified_base 48..49: mod_base = OTHER; note = uracil
  modified_base 51..52: mod_base = OTHER; note = uracil
  source 1..59: mol_type = other DNA
tctgtacggtgacaaggcgtnnnactnnntgatgagagagtactgaattcttgcagcag

SEQ ID NO: 770 - DNA, 59 bp, synthetic construct
  misc_feature 1..59: note = Synthetic Primer
  misc_difference 21..23: note = n is a, c, g, t or u
  misc_difference 27..29: note = n is a, c, g, t or u
  modified_base 20: mod_base = OTHER; note = uracil
  modified_base 33: mod_base = OTHER; note = uracil
  modified_base 36..37: mod_base = OTHER; note = uracil
  modified_base 43: mod_base = OTHER; note = uracil
  modified_base 48..50: mod_base = OTHER; note = uracil
  modified_base 53: mod_base = OTHER; note = uracil
  source 1..59: mol_type = other DNA
tctgtacggtgacaaggcgtnnnactnnntgatacttcaaaatcaagtttgctgagact

SEQ ID NO: 771 - DNA, 59 bp, synthetic construct
  misc_feature 1..59: note = Synthetic Primer
  misc_difference 21..23: note = n is a, c, g, t or u
  misc_difference 27..29: note = n is a, c, g, t or u
  modified_base 20: mod_base = OTHER; note = uracil
  modified_base 33: mod_base = OTHER; note = uracil
  modified_base 38..39: mod_base = OTHER; note = uracil
  modified_base 43: mod_base = OTHER; note = uracil
  source 1..59: mol_type = other DNA
tctgtacggtgacaaggcgtnnnactnnntgatgcaattcactaacaagaaaacaggga

SEQ ID NO: 772 - DNA, 59 bp, synthetic construct
  misc_feature 1..59: note = Synthetic Primer
  misc_difference 21..23: note = n is a, c, g, t or u
  misc_difference 27..29: note = n is a, c, g, t or u
  modified_base 20: mod_base = OTHER; note = uracil
  modified_base 33: mod_base = OTHER; note = uracil
  modified_base 37: mod_base = OTHER; note = uracil
  modified_base 50: mod_base = OTHER; note = uracil
  source 1..59: mol_type = other DNA
tctgtacggtgacaaggcgtnnnactnnntgataaatacacagacaaactccagaaagc

SEQ ID NO: 773 - DNA, 59 bp, synthetic construct
  misc_feature 1..59: note = Synthetic Primer
  misc_difference 21..23: note = n is a, c, g, t or u
  misc_difference 27..29: note = n is a, c, g, t or u
  modified_base 20: mod_base = OTHER; note = uracil
  modified_base 33: mod_base = OTHER; note = uracil
  modified_base 35: mod_base = OTHER; note = uracil
  modified_base 38: mod_base = OTHER; note = uracil
  modified_base 40..42: mod_base = OTHER; note = uracil
  modified_base 45: mod_base = OTHER; note = uracil
  modified_base 48: mod_base = OTHER; note = uracil
  modified_base 52..53: mod_base = OTHER; note = uracil
  modified_base 56: mod_base = OTHER; note = uracil
  modified_base 58: mod_base = OTHER; note = uracil
  source 1..59: mol_type = other DNA
tctgtacggtgacaaggcgtnnnactnnntgatctactgtttgctcctaacttgctctt

SEQ ID NO: 774 - DNA, 59 bp, synthetic construct
  misc_feature 1..59: note = Synthetic Primer
  misc_difference 21..23: note = n is a, c, g, t or u
  misc_difference 27..29: note = n is a, c, g, t or u
  modified_base 20: mod_base = OTHER; note = uracil
  modified_base 33: mod_base = OTHER; note = uracil
  modified_base 46: mod_base = OTHER; note = uracil
  modified_base 50..51: mod_base = OTHER; note = uracil
  modified_base 53..54: mod_base = OTHER; note = uracil
  modified_base 57..58: mod_base = OTHER; note = uracil
  source 1..59: mol_type = other DNA
tctgtacggtgacaaggcgtnnnactnnntgatcagagaggaaagtcccttattgattg

SEQ ID NO: 775 - DNA, 59 bp, synthetic construct
  misc_feature 1..59: note = Synthetic Primer
  misc_difference 21..23: note = n is a, c, g, t or u
  misc_difference 27..29: note = n is a, c, g, t or u
  modified_base 20: mod_base = OTHER; note = uracil
  modified_base 33..34: mod_base = OTHER; note = uracil
  modified_base 38: mod_base = OTHER; note = uracil
  modified_base 40: mod_base = OTHER; note = uracil
  modified_base 43: mod_base = OTHER; note = uracil
  modified_base 48..49: mod_base = OTHER; note = uracil
  modified_base 53..55: mod_base = OTHER; note = uracil
  modified_base 57: mod_base = OTHER; note = uracil
  source 1..59: mol_type = other DNA
tctgtacggtgacaaggcgtnnnactnnntgattgagtgtggtggagttcagtttctat

SEQ ID NO: 776 - DNA, 59 bp, synthetic construct
  misc_feature 1..59: note = Synthetic Primer
  misc_difference 21..23: note = n is a, c, g, t or u
  misc_difference 27..29: note = n is a, c, g, t or u
  modified_base 20: mod_base = OTHER; note = uracil
  modified_base 33: mod_base = OTHER; note = uracil
  modified_base 40..41: mod_base = OTHER; note = uracil
  modified_base 49: mod_base = OTHER; note = uracil
  modified_base 55..56: mod_base = OTHER; note = uracil
  source 1..59: mol_type = other DNA
tctgtacggtgacaaggcgtnnnactnnntgataagaccttgcagaaataggaattgct

SEQ ID NO: 777 - DNA, 59 bp, synthetic construct
  misc_feature 1..59: note = Synthetic Primer
  misc_difference 21..23: note = n is a, c, g, t or u
  misc_difference 27..29: note = n is a, c, g, t or u
  modified_base 20: mod_base = OTHER; note = uracil
  modified_base 33: mod_base = OTHER; note = uracil
  modified_base 42: mod_base = OTHER; note = uracil
  modified_base 52..53: mod_base = OTHER; note = uracil
  source 1..59: mol_type = other DNA
tctgtacggtgacaaggcgtnnnactnnntgatgaagaaaatgaaaaggagttagcagc

SEQ ID NO: 778 - DNA, 59 bp, synthetic construct
  misc_feature 1..59: note = Synthetic Primer
  misc_difference 21..23: note = n is a, c, g, t or u
  misc_difference 27..29: note = n is a, c, g, t or u
  modified_base 20: mod_base = OTHER; note = uracil
  modified_base 33: mod_base = OTHER; note = uracil
  modified_base 37: mod_base = OTHER; note = uracil
  modified_base 44: mod_base = OTHER; note = uracil
  modified_base 46..47: mod_base = OTHER; note = uracil
  modified_base 49: mod_base = OTHER; note = uracil
  source 1..59: mol_type = other DNA
tctgtacggtgacaaggcgtnnnactnnntgatgagtaacacatcttctcaaccaggac

SEQ ID NO: 779 - DNA, 59 bp, synthetic construct
  misc_feature 1..59: note = Synthetic Primer
  misc_difference 21..23: note = n is a, c, g, t or u
  misc_difference 27..29: note = n is a, c, g, t or u
  modified_base 20: mod_base = OTHER; note = uracil
  modified_base 33..34: mod_base = OTHER; note = uracil
  modified_base 38..42: mod_base = OTHER; note = uracil
  modified_base 44..45: mod_base = OTHER; note = uracil
  modified_base 55: mod_base = OTHER; note = uracil
  source 1..59: mol_type = other DNA
tctgtacggtgacaaggcgtnnnactnnntgattggatttttcttaccacaacatgaca

SEQ ID NO: 780 - DNA, 59 bp, synthetic construct
  misc_feature 1..59: note = Synthetic Primer
  misc_difference 21..23: note = n is a, c, g, t or u
  misc_difference 27..29: note = n is a, c, g, t or u
  modified_base 20: mod_base = OTHER; note = uracil
  modified_base 33: mod_base = OTHER; note = uracil
  modified_base 35..37: mod_base = OTHER; note = uracil
  modified_base 41..43: mod_base = OTHER; note = uracil
  modified_base 46: mod_base = OTHER; note = uracil
  modified_base 51: mod_base = OTHER; note = uracil
  source 1..59: mol_type = other DNA
tctgtacggtgacaaggcgtnnnactnnntgatatttcagtttgctgaagtcaaggagg

SEQ ID NO: 781 - DNA, 59 bp, synthetic construct
  misc_feature 1..59: note = Synthetic Primer
  misc_difference 21..23: note = n is a, c, g, t or u
  misc_difference 27..29: note = n is a, c, g, t or u
  modified_base 20: mod_base = OTHER; note = uracil
  modified_base 33: mod_base = OTHER; note = uracil
  modified_base 37..39: mod_base = OTHER; note = uracil
  modified_base 41..42: mod_base = OTHER; note = uracil
  modified_base 44: mod_base = OTHER; note = uracil
  modified_base 47: mod_base = OTHER; note = uracil
  modified_base 50: mod_base = OTHER; note = uracil
  modified_base 54..57: mod_base = OTHER; note = uracil
  source 1..59: mol_type = other DNA
tctgtacggtgacaaggcgtnnnactnnntgatggatttcttctgatggtagcttttgt

SEQ ID NO: 782 - DNA, 59 bp, synthetic construct
  misc_feature 1..59: note = Synthetic Primer
  misc_difference 21..23: note = n is a, c, g, t or u
  misc_difference 27..29: note = n is a, c, g, t or u
  modified_base 20: mod_base = OTHER; note = uracil
  modified_base 33: mod_base = OTHER; note = uracil
  modified_base 37: mod_base = OTHER; note = uracil
  modified_base 39: mod_base = OTHER; note = uracil
  modified_base 51: mod_base = OTHER; note = uracil
  modified_base 54: mod_base = OTHER; note = uracil
  source 1..59: mol_type = other DNA
tctgtacggtgacaaggcgtnnnactnnntgatcagtctacaaaaagacctgctagagc

SEQ ID NO: 783 - DNA, 59 bp, synthetic construct
  misc_feature 1..59: note = Synthetic Primer
  misc_difference 21..23: note = n is a, c, g, t or u
  misc_difference 27..29: note = n is a, c, g, t or u
  modified_base 20: mod_base = OTHER; note = uracil
  modified_base 33: mod_base = OTHER; note = uracil
  modified_base 35: mod_base = OTHER; note = uracil
  modified_base 37: mod_base = OTHER; note = uracil
  modified_base 41: mod_base = OTHER; note = uracil
  modified_base 47..49: mod_base = OTHER; note = uracil
  modified_base 52: mod_base = OTHER; note = uracil
  modified_base 54: mod_base = OTHER; note = uracil
  modified_base 56..57: mod_base = OTHER; note = uracil
  source 1..59: mol_type = other DNA
tctgtacggtgacaaggcgtnnnactnnntgatgtgtggatgaaactttgatgtgttca

SEQ ID NO: 784 - DNA, 59 bp, synthetic construct
  misc_feature 1..59: note = Synthetic Primer
  misc_difference 21..23: note = n is a, c, g, t or u
  misc_difference 27..29: note = n is a, c, g, t or u
  modified_base 20: mod_base = OTHER; note = uracil
  modified_base 33: mod_base = OTHER; note = uracil
  modified_base 38..39: mod_base = OTHER; note = uracil
  modified_base 41: mod_base = OTHER; note = uracil
  modified_base 51: mod_base = OTHER; note = uracil
  modified_base 55: mod_base = OTHER; note = uracil
  source 1..59: mol_type = other DNA
tctgtacggtgacaaggcgtnnnactnnntgatagaattatggaccagactcagtgcct

SEQ ID NO: 785 - DNA, 59 bp, synthetic construct
  misc_feature 1..59: note = Synthetic Primer
  misc_difference 21..23: note = n is a, c, g, t or u
  misc_difference 27..29: note = n is a, c, g, t or u
  modified_base 20: mod_base = OTHER; note = uracil
  modified_base 33: mod_base = OTHER; note = uracil
  modified_base 43..44: mod_base = OTHER; note = uracil
  modified_base 47: mod_base = OTHER; note = uracil
  modified_base 50: mod_base = OTHER; note = uracil
  modified_base 52..53: mod_base = OTHER; note = uracil
  source 1..59: mol_type = other DNA
tctgtacggtgacaaggcgtnnnactnnntgatcgggaggaattcatcatattcaacag

SEQ ID NO: 786 - DNA, 59 bp, synthetic construct
  misc_feature 1..59: note = Synthetic Primer
  misc_difference 21..23: note = n is a, c, g, t or u
  misc_difference 27..29: note = n is a, c, g, t or u
  modified_base 20: mod_base = OTHER; note = uracil
  modified_base 33: mod_base = OTHER; note = uracil
  modified_base 43: mod_base = OTHER; note = uracil
  modified_base 47: mod_base = OTHER; note = uracil
  source 1..59: mol_type = other DNA
tctgtacggtgacaaggcgtnnnactnnntgataaaaagacatggatgaaagacgacga

SEQ ID NO: 787 - DNA, 59 bp, synthetic construct
  misc_feature 1..59: note = Synthetic Primer
  misc_difference 21..23: note = n is a, c, g, t or u
  misc_difference 27..29: note = n is a, c, g, t or u
  modified_base 20: mod_base = OTHER; note = uracil
  modified_base 33: mod_base = OTHER; note = uracil
  modified_base 36: mod_base = OTHER; note = uracil
  modified_base 42: mod_base = OTHER; note = uracil
  modified_base 44: mod_base = OTHER; note = uracil
  modified_base 51: mod_base = OTHER; note = uracil
  modified_base 57..58: mod_base = OTHER; note = uracil
  source 1..59: mol_type = other DNA
tctgtacggtgacaaggcgtnnnactnnntgatagtaggactgtagacagtgaaacttg

SEQ ID NO: 788 - DNA, 59 bp, synthetic construct
  misc_feature 1..59: note = Synthetic Primer
  misc_difference 21..23: note = n is a, c, g, t or u
  misc_difference 27..29: note = n is a, c, g, t or u
  modified_base 20: mod_base = OTHER; note = uracil
  modified_base 33: mod_base = OTHER; note = uracil
  modified_base 35: mod_base = OTHER; note = uracil
  modified_base 37..38: mod_base = OTHER; note = uracil
  modified_base 43: mod_base = OTHER; note = uracil
  modified_base 45: mod_base = OTHER; note = uracil
  modified_base 48..50: mod_base = OTHER; note = uracil
  modified_base 54: mod_base = OTHER; note = uracil
  modified_base 56: mod_base = OTHER; note = uracil
  source 1..59: mol_type = other DNA
tctgtacggtgacaaggcgtnnnactnnntgatctattgggatatcctttcactctgca

SEQ ID NO: 789 - DNA, 59 bp, synthetic construct
  misc_feature 1..59: note = Synthetic Primer
  misc_difference 21..23: note = n is a, c, g, t or u
  misc_difference 27..29: note = n is a, c, g, t or u
  modified_base 20: mod_base = OTHER; note = uracil
  modified_base 33: mod_base = OTHER; note = uracil
  modified_base 35: mod_base = OTHER; note = uracil
  modified_base 38: mod_base = OTHER; note = uracil
  modified_base 56: mod_base = OTHER; note = uracil
  source 1..59: mol_type = other DNA
tctgtacggtgacaaggcgtnnnactnnntgatatgatcgggaaacacaaaaacatcat

SEQ ID NO: 790 - DNA, 59 bp, synthetic construct
  misc_feature 1..59: note = Synthetic Primer
  misc_difference 21..23: note = n is a, c, g, t or u
  misc_difference 27..29: note = n is a, c, g, t or u
  modified_base 20: mod_base = OTHER; note = uracil
  modified_base 33..35: mod_base = OTHER; note = uracil
  modified_base 38: mod_base = OTHER; note = uracil
  modified_base 42: mod_base = OTHER; note = uracil
  modified_base 46: mod_base = OTHER; note = uracil
  modified_base 49: mod_base = OTHER; note = uracil
  modified_base 51: mod_base = OTHER; note = uracil
  modified_base 56: mod_base = OTHER; note = uracil
  modified_base 58: mod_base = OTHER; note = uracil
  source 1..59: mol_type = other DNA
tctgtacggtgacaaggcgtnnnactnnntgatttcctagctgaatgctataacctctg

SEQ ID NO: 791 - DNA, 60 bp, synthetic construct
  misc_feature 1..60: note = Synthetic Primer
  misc_difference 21..23: note = n is a, c, g, t or u
  misc_difference 27..29: note = n is a, c, g, t or u
  modified_base 20: mod_base = OTHER; note = uracil
  modified_base 33: mod_base = OTHER; note = uracil
  modified_base 35: mod_base = OTHER; note = uracil
  modified_base 44..45: mod_base = OTHER; note = uracil
  modified_base 47: mod_base = OTHER; note = uracil
  modified_base 49: mod_base = OTHER; note = uracil
  modified_base 52: mod_base = OTHER; note = uracil
  modified_base 54: mod_base = OTHER; note = uracil
  source 1..60: mol_type = other DNA
tctgtacggtgacaaggcgtnnnactnnntgatatccaagcaattctatgctatacacac

SEQ ID NO: 792 - DNA, 60 bp, synthetic construct
  misc_feature 1..60: note = Synthetic Primer
  misc_difference 21..23: note = n is a, c, g, t or u
  misc_difference 27..29: note = n is a, c, g, t or u
  modified_base 20: mod_base = OTHER; note = uracil
  modified_base 33: mod_base = OTHER; note = uracil
  modified_base 42..44: mod_base = OTHER; note = uracil
  modified_base 46: mod_base = OTHER; note = uracil
  modified_base 49..52: mod_base = OTHER; note = uracil
  modified_base 55: mod_base = OTHER; note = uracil
  modified_base 57: mod_base = OTHER; note = uracil
  source 1..60: mol_type = other DNA
tctgtacggtgacaaggcgtnnnactnnntgatcacaaagatttgtgattttggtctagc

SEQ ID NO: 793 - DNA, 60 bp, synthetic construct
  misc_feature 1..60: note = Synthetic Primer
  misc_difference 21..23: note = n is a, c, g, t or u
  misc_difference 27..29: note = n is a, c, g, t or u
  modified_base 20: mod_base = OTHER; note = uracil
  modified_base 33: mod_base = OTHER; note = uracil
  modified_base 35: mod_base = OTHER; note = uracil
  modified_base 43..46: mod_base = OTHER; note = uracil
  modified_base 52..54: mod_base = OTHER; note = uracil
  modified_base 56: mod_base = OTHER; note = uracil
  source 1..60: mol_type = other DNA
tctgtacggtgacaaggcgtnnnactnnntgatctgaccaacttttcccagtttctcaat

SEQ ID NO: 794 - DNA, 60 bp, synthetic construct
  misc_feature 1..60: note = Synthetic Primer
  misc_difference 21..23: note = n is a, c, g, t or u
  misc_difference 27..29: note = n is a, c, g, t or u
  modified_base 20: mod_base = OTHER; note = uracil
  modified_base 33: mod_base = OTHER; note = uracil
  modified_base 37..39: mod_base = OTHER; note = uracil
  modified_base 42: mod_base = OTHER; note = uracil
  modified_base 44: mod_base = OTHER; note = uracil
  modified_base 49: mod_base = OTHER; note = uracil
  modified_base 51: mod_base = OTHER; note = uracil
  modified_base 53: mod_base = OTHER; note = uracil
  modified_base 57: mod_base = OTHER; note = uracil
  source 1..60: mol_type = other DNA
tctgtacggtgacaaggcgtnnnactnnntgatacctttcctctggagtatctacatgaa

SEQ ID NO: 795 - DNA, 60 bp, synthetic construct
  misc_feature 1..60: note = Synthetic Primer
  misc_difference 21..23: note = n is a, c, g, t or u
  misc_difference 27..29: note = n is a, c, g, t or u
  modified_base 20: mod_base = OTHER; note = uracil
  modified_base 33: mod_base = OTHER; note = uracil
  modified_base 37: mod_base = OTHER; note = uracil
  modified_base 39..40: mod_base = OTHER; note = uracil
  modified_base 42..44: mod_base = OTHER; note = uracil
  modified_base 52: mod_base = OTHER; note = uracil
  modified_base 55: mod_base = OTHER; note = uracil
  modified_base 57..59: mod_base = OTHER; note = uracil
  source 1..60: mol_type = other DNA
tctgtacggtgacaaggcgtnnnactnnntgatcactgttgtttcacaagatgatgtttg

SEQ ID NO: 796 - DNA, 60 bp, synthetic construct
  misc_feature 1..60: note = Synthetic Primer
  misc_difference 21..23: note = n is a, c, g, t or u
  misc_difference 27..29: note = n is a, c, g, t or u
  modified_base 20: mod_base = OTHER; note = uracil
  modified_base 33: mod_base = OTHER; note = uracil
  modified_base 35..37: mod_base = OTHER; note = uracil
  modified_base 43..44: mod_base = OTHER; note = uracil
  modified_base 52..54: mod_base = OTHER; note = uracil
  modified_base 57: mod_base = OTHER; note = uracil
  modified_base 59: mod_base = OTHER; note = uracil
  source 1..60: mol_type = other DNA
tctgtacggtgacaaggcgtnnnactnnntgatgtttgacagttaaaggcatttcctgtg

SEQ ID NO: 797 - DNA, 60 bp, synthetic construct
  misc_feature 1..60: note = Synthetic Primer
  misc_difference 21..23: note = n is a, c, g, t or u
  misc_difference 27..29: note = n is a, c, g, t or u
  modified_base 20: mod_base = OTHER; note = uracil
  modified_base 33: mod_base = OTHER; note = uracil
  modified_base 37..38: mod_base = OTHER; note = uracil
  modified_base 43..47: mod_base = OTHER; note = uracil
  modified_base 54..58: mod_base = OTHER; note = uracil
  source 1..60: mol_type = other DNA
tctgtacggtgacaaggcgtnnnactnnntgataccttcggctttttcaaccctttttaa

SEQ ID NO: 798 - DNA, 60 bp, synthetic construct
  misc_feature 1..60: note = Synthetic Primer
  misc_difference 21..23: note = n is a, c, g, t or u
  misc_difference 27..29: note = n is a, c, g, t or u
  modified_base 20: mod_base = OTHER; note = uracil
  modified_base 33: mod_base = OTHER; note = uracil
  modified_base 44..45: mod_base = OTHER; note = uracil
  modified_base 50: mod_base = OTHER; note = uracil
  modified_base 54: mod_base = OTHER; note = uracil
  modified_base 57..59: mod_base = OTHER; note = uracil
  source 1..60: mol_type = other DNA
tctgtacggtgacaaggcgtnnnactnnntgatggaaacaacattcaactccctactttg

SEQ ID NO: 799 - DNA, 60 bp, synthetic construct
  misc_feature 1..60: note = Synthetic Primer
  misc_difference 21..23: note = n is a, c, g, t or u
  misc_difference 27..29: note = n is a, c, g, t or u
  modified_base 20: mod_base = OTHER; note = uracil
  modified_base 33: mod_base = OTHER; note = uracil
  modified_base 37: mod_base = OTHER; note = uracil
  modified_base 40: mod_base = OTHER; note = uracil
  modified_base 46: mod_base = OTHER; note = uracil
  modified_base 52..53: mod_base = OTHER; note = uracil
  source 1..60: mol_type = other DNA
tctgtacggtgacaaggcgtnnnactnnntgataaatcatcaacatcaacattgcagact

SEQ ID NO: 800 - DNA, 60 bp, synthetic construct
  misc_feature 1..60: note = Synthetic Primer
  misc_difference 21..23: note = n is a, c, g, t or u
  misc_difference 27..29: note = n is a, c, g, t or u
  modified_base 20: mod_base = OTHER; note = uracil
  modified_base 33: mod_base = OTHER; note = uracil
  modified_base 36: mod_base = OTHER; note = uracil
  modified_base 40: mod_base = OTHER; note = uracil
  modified_base 43: mod_base = OTHER; note = uracil
  modified_base 45..46: mod_base = OTHER; note = uracil
  modified_base 52..54: mod_base = OTHER; note = uracil
  modified_base 59: mod_base = OTHER; note = uracil
  source 1..60: mol_type = other DNA
tctgtacggtgacaaggcgtnnnactnnntgatgatggctgatcttgaaggtttacactt

SEQ ID NO: 801 - DNA, 60 bp, synthetic construct
  misc_feature 1..60: note = Synthetic Primer
  misc_difference 21..23: note = n is a, c, g, t or u
  misc_difference 27..29: note = n is a, c, g, t or u
  modified_base 20: mod_base = OTHER; note = uracil
  modified_base 33: mod_base = OTHER; note = uracil
  modified_base 38: mod_base = OTHER; note = uracil
  modified_base 40..41: mod_base = OTHER; note = uracil
  modified_base 46: mod_base = OTHER; note = uracil
  modified_base 52: mod_base = OTHER; note = uracil
  modified_base 57: mod_base = OTHER; note = uracil
  source 1..60: mol_type = other DNA
tctgtacggtgacaaggcgtnnnactnnntgatcaagtattacaatagagctgggatgga

SEQ ID NO: 802 - DNA, 60 bp, synthetic construct
  misc_feature 1..60: note = Synthetic Primer
  misc_difference 21..23: note = n is a, c, g, t or u
  misc_difference 27..29: note = n is a, c, g, t or u
  modified_base 20: mod_base = OTHER; note = uracil
  modified_base 33: mod_base = OTHER; note = uracil
  modified_base 40: mod_base = OTHER; note = uracil
  modified_base 43: mod_base = OTHER; note = uracil
  modified_base 45: mod_base = OTHER; note = uracil
  modified_base 48..49: mod_base = OTHER; note = uracil
  modified_base 51..52: mod_base = OTHER; note = uracil
  source 1..60: mol_type = other DNA
tctgtacggtgacaaggcgtnnnactnnntgatggaggatcctgtaattattgaaagagc

SEQ ID NO: 803 - DNA, 60 bp, synthetic construct
  misc_feature 1..60: note = Synthetic Primer
  misc_difference 21..23: note = n is a, c, g, t or u
  misc_difference 27..29: note = n is a, c, g, t or u
  modified_base 20: mod_base = OTHER; note = uracil
  modified_base 33..34: mod_base = OTHER; note = uracil
  modified_base 42..43: mod_base = OTHER; note = uracil
  modified_base 47: mod_base = OTHER; note = uracil
  modified_base 50: mod_base = OTHER; note = uracil
  modified_base 52..53: mod_base = OTHER; note = uracil
  modified_base 57..58: mod_base = OTHER; note = uracil
  source 1..60: mol_type = other DNA
tctgtacggtgacaaggcgtnnnactnnntgattagaagacttgactggtcttacattgc

SEQ ID NO: 804 - DNA, 60 bp, synthetic construct
  misc_feature 1..60: note = Synthetic Primer
  misc_difference 21..23: note = n is a, c, g, t or u
  misc_difference 27..29: note = n is a, c, g, t or u
  modified_base 20: mod_base = OTHER; note = uracil
  modified_base 33: mod_base = OTHER; note = uracil
  modified_base 47: mod_base = OTHER; note = uracil
  modified_base 52: mod_base = OTHER; note = uracil
  source 1..60: mol_type = other DNA
tctgtacggtgacaaggcgtnnnactnnntgataggaagaagcagatcagatacgaaaaa

SEQ ID NO: 805 - DNA, 60 bp, synthetic construct
  misc_feature 1..60: note = Synthetic Primer
  misc_difference 21..23: note = n is a, c, g, t or u
  misc_difference 27..29: note = n is a, c, g, t or u
  modified_base 20: mod_base = OTHER; note = uracil
  modified_base 33: mod_base = OTHER; note = uracil
  modified_base 39: mod_base = OTHER; note = uracil
  modified_base 47..48: mod_base = OTHER; note = uracil
  modified_base 50: mod_base = OTHER; note = uracil
  modified_base 54: mod_base = OTHER; note = uracil
  modified_base 56: mod_base = OTHER; note = uracil
  source 1..60: mol_type = other DNA
tctgtacggtgacaaggcgtnnnactnnntgatcacagtaaagagattgtggctatcagc

SEQ ID NO: 806 - DNA, 60 bp, synthetic construct
  misc_feature 1..60: note = Synthetic Primer
  misc_difference 21..23: note = n is a, c, g, t or u
  misc_difference 27..29: note = n is a, c, g, t or u
  modified_base 20: mod_base = OTHER; note = uracil
  modified_base 33: mod_base = OTHER; note = uracil
  modified_base 36: mod_base = OTHER; note = uracil
  modified_base 38: mod_base = OTHER; note = uracil
  modified_base 50: mod_base = OTHER; note = uracil
  modified_base 56: mod_base = OTHER; note = uracil
  source 1..60: mol_type = other DNA
tctgtacggtgacaaggcgtnnnactnnntgatcgtatacaaaggaaactcagactccag

SEQ ID NO: 807 - DNA, 60 bp, synthetic construct
  misc_feature 1..60: note = Synthetic Primer
  misc_difference 21..23: note = n is a, c, g, t or u
  misc_difference 27..29: note = n is a, c, g, t or u
  modified_base 20: mod_base = OTHER; note = uracil
  modified_base 33: mod_base = OTHER; note = uracil
  modified_base 36: mod_base = OTHER; note = uracil
  modified_base 40: mod_base = OTHER; note = uracil
  modified_base 43..45: mod_base = OTHER; note = uracil
  modified_base 51: mod_base = OTHER; note = uracil
  modified_base 55..57: mod_base = OTHER; note = uracil
  source 1..60: mol_type = other DNA
tctgtacggtgacaaggcgtnnnactnnntgataatgaatcatttggaggtggatttgct

SEQ ID NO: 808 - DNA, 60 bp, synthetic construct
  misc_feature 1..60: note = Synthetic Primer
  misc_difference 21..23: note = n is a, c, g, t or u
  misc_difference 27..29: note = n is a, c, g, t or u
  modified_base 20: mod_base = OTHER; note = uracil
  modified_base 33: mod_base = OTHER; note = uracil
  modified_base 35..36: mod_base = OTHER; note = uracil
  modified_base 41..42: mod_base = OTHER; note = uracil
  modified_base 44: mod_base = OTHER; note = uracil
  modified_base 48: mod_base = OTHER; note = uracil
  modified_base 53..54: mod_base = OTHER; note = uracil
  modified_base 59: mod_base = OTHER; note = uracil
  source 1..60: mol_type = other DNA
tctgtacggtgacaaggcgtnnnactnnntgatgttccacttgtcagtgaagttcaaata

SEQ ID NO: 809 - DNA, 60 bp, synthetic construct
  misc_feature 1..60: note = Synthetic Primer
  misc_difference 21..23: note = n is a, c, g, t or u
  misc_difference 27..29: note = n is a, c, g, t or u
  modified_base 20: mod_base = OTHER; note = uracil
  modified_base 33: mod_base = OTHER; note = uracil
  modified_base 40..41: mod_base = OTHER; note = uracil
  modified_base 45: mod_base = OTHER; note = uracil
  modified_base 50..51: mod_base = OTHER; note = uracil
  modified_base 53: mod_base = OTHER; note = uracil
  modified_base 57: mod_base = OTHER; note = uracil
  modified_base 59: mod_base = OTHER; note = uracil
  source 1..60: mol_type = other DNA
tctgtacggtgacaaggcgtnnnactnnntgatgaagacttggatcgaattctcactctc

SEQ ID NO: 810 - DNA, 60 bp, synthetic construct
  misc_feature 1..60: note = Synthetic Primer
  misc_difference 21..23: note = n is a, c, g, t or u
  misc_difference 27..29: note = n is a, c, g, t or u
  modified_base 20: mod_base = OTHER; note = uracil
  modified_base 33: mod_base = OTHER; note = uracil
  modified_base 41: mod_base = OTHER; note = uracil
  modified_base 43..44: mod_base = OTHER; note = uracil
  modified_base 49: mod_base = OTHER; note = uracil
  modified_base 51: mod_base = OTHER; note = uracil
  modified_base 55: mod_base = OTHER; note = uracil
  source 1..60: mol_type = other DNA
tctgtacggtgacaaggcgtnnnactnnntgataaagggatcttccagtatgactaccat

SEQ ID NO: 811 - DNA, 60 bp, synthetic construct
  misc_feature 1..60: note = Synthetic Primer
  misc_difference 21..23: note = n is a, c, g, t or u
  misc_difference 27..29: note = n is a, c, g, t or u
  modified_base 20: mod_base = OTHER; note = uracil
  modified_base 33: mod_base = OTHER; note = uracil
  modified_base 35: mod_base = OTHER; note = uracil
  modified_base 50: mod_base = OTHER; note = uracil
  modified_base 52..53: mod_base = OTHER; note = uracil
  source 1..60: mol_type = other DNA
tctgtacggtgacaaggcgtnnnactnnntgatgtaacgaaacagacagtcttacagaag

SEQ ID NO: 812 - DNA, 60 bp, synthetic construct
  misc_feature 1..60: note = Synthetic Primer
  misc_difference 21..23: note = n is a, c, g, t or u
  misc_difference 27..29: note = n is a, c, g, t or u
  modified_base 20: mod_base = OTHER; note = uracil
  modified_base 33..35: mod_base = OTHER; note = uracil
  modified_base 43: mod_base = OTHER; note = uracil
  modified_base 55..56: mod_base = OTHER; note = uracil
  source 1..60: mol_type = other DNA
tctgtacggtgacaaggcgtnnnactnnntgatttgaaacactcagaaaaacagttgagg

SEQ ID NO: 813 - DNA, 60 bp, synthetic construct
  misc_feature 1..60: note = Synthetic Primer
  misc_difference 21..23: note = n is a, c, g, t or u
  misc_difference 27..29: note = n is a, c, g, t or u
  modified_base 20: mod_base = OTHER; note = uracil
  modified_base 33: mod_base = OTHER; note = uracil
  modified_base 35: mod_base = OTHER; note = uracil
  modified_base 46..47: mod_base = OTHER; note = uracil
  source 1..60: mol_type = other DNA
tctgtacggtgacaaggcgtnnnactnnntgatctagaggaagagttaagaaaggccaac

SEQ ID NO: 814 - DNA, 60 bp, synthetic construct
  misc_feature 1..60: note = Synthetic Primer
  misc_difference 21..23: note = n is a, c, g, t or u
  misc_difference 27..29: note = n is a, c, g, t or u
  modified_base 20: mod_base = OTHER; note = uracil
  modified_base 33: mod_base = OTHER; note = uracil
  modified_base 45: mod_base = OTHER; note = uracil
  modified_base 47: mod_base = OTHER; note = uracil
  modified_base 51: mod_base = OTHER; note = uracil
  modified_base 55..56: mod_base = OTHER; note = uracil
  source 1..60: mol_type = other DNA
tctgtacggtgacaaggcgtnnnactnnntgatgcagaacaggatataactaccttggag

SEQ ID NO: 815 - DNA, 60 bp, synthetic construct
  misc_feature 1..60: note = Synthetic Primer
  misc_difference 21..23: note = n is a, c, g, t or u
  misc_difference 27..29: note = n is a, c, g, t or u
  modified_base 20: mod_base = OTHER; note = uracil
  modified_base 33: mod_base = OTHER; note = uracil
  modified_base 39: mod_base = OTHER; note = uracil
  modified_base 47..48: mod_base = OTHER; note = uracil
  modified_base 52: mod_base = OTHER; note = uracil
  modified_base 54: mod_base = OTHER; note = uracil
  source 1..60: mol_type = other DNA
tctgtacggtgacaaggcgtnnnactnnntgatgacagtgagagacttcagtatgaaaaa

SEQ ID NO: 816 - DNA, 60 bp, synthetic construct
  misc_feature 1..60: note = Synthetic Primer
  misc_difference 21..23: note = n is a, c, g, t or u
  misc_difference 27..29: note = n is a, c, g, t or u
  modified_base 20: mod_base = OTHER; note = uracil
  modified_base 33: mod_base = OTHER; note = uracil
  modified_base 37..38: mod_base = OTHER; note = uracil
  modified_base 40: mod_base = OTHER; note = uracil
  modified_base 47: mod_base = OTHER; note = uracil
  modified_base 50: mod_base = OTHER; note = uracil
  modified_base 53: mod_base = OTHER; note = uracil
  modified_base 55: mod_base = OTHER; note = uracil
  modified_base 59: mod_base = OTHER; note = uracil
  source 1..60: mol_type = other DNA
tctgtacggtgacaaggcgtnnnactnnntgatgaattatgagacctactgatgtccctg

SEQ ID NO: 817 - DNA, 60 bp, synthetic construct
  misc_feature 1..60: note = Synthetic Primer
  misc_difference 21..23: note = n is a, c, g, t or u
  misc_difference 27..29: note = n is a, c, g, t or u
  modified_base 20: mod_base = OTHER; note = uracil
  modified_base 33: mod_base = OTHER; note = uracil
  modified_base 35..36: mod_base = OTHER; note = uracil
  modified_base 39: mod_base = OTHER; note = uracil
  modified_base 47: mod_base = OTHER; note = uracil
  modified_base 50..52: mod_base = OTHER; note = uracil
  modified_base 59: mod_base = OTHER; note = uracil
  source 1..60: mol_type = other DNA
tctgtacggtgacaaggcgtnnnactnnntgatattcctcagggaatactttgagaggtt

SEQ ID NO: 818 - DNA, 60 bp, synthetic construct
  misc_feature 1..60: note = Synthetic Primer
  misc_difference 21..23: note = n is a, c, g, t or u
  misc_difference 27..29: note = n is a, c, g, t or u
  modified_base 20: mod_base = OTHER; note = uracil
  modified_base 33: mod_base = OTHER; note = uracil
  modified_base 35..37: mod_base = OTHER; note = uracil
  modified_base 44: mod_base = OTHER; note = uracil
  modified_base 47: mod_base = OTHER; note = uracil
  modified_base 50: mod_base = OTHER; note = uracil
  modified_base 53..55: mod_base = OTHER; note = uracil
  source 1..60: mol_type = other DNA
tctgtacggtgacaaggcgtnnnactnnntgatctttgcaagctgataatgatttcacca

SEQ ID NO: 819 - DNA, 60 bp, synthetic construct
  misc_feature 1..60: note = Synthetic Primer
  misc_difference 21..23: note = n is a, c, g, t or u
  misc_difference 27..29: note = n is a, c, g, t or u
  modified_base 20: mod_base = OTHER; note = uracil
  modified_base 33: mod_base = OTHER; note = uracil
  modified_base 35..36: mod_base = OTHER; note = uracil
  modified_base 39: mod_base = OTHER; note = uracil
  modified_base 47: mod_base = OTHER; note = uracil
  modified_base 51: mod_base = OTHER; note = uracil
  modified_base 53: mod_base = OTHER; note = uracil
  modified_base 55..57: mod_base = OTHER; note = uracil
  source 1..60: mol_type = other DNA
tctgtacggtgacaaggcgtnnnactnnntgatgttgctccagcactaagtgtatttaat

SEQ ID NO: 820 - DNA, 60 bp, synthetic construct
  misc_feature 1..60: note = Synthetic Primer
  misc_difference 21..23: note = n is a, c, g, t or u
  misc_difference 27..29: note = n is a, c, g, t or u
  modified_base 20: mod_base = OTHER; note = uracil
  modified_base 33: mod_base = OTHER; note = uracil
  modified_base 36: mod_base = OTHER; note = uracil
  modified_base 40..42: mod_base = OTHER; note = uracil
  modified_base 46: mod_base = OTHER; note = uracil
  modified_base 48: mod_base = OTHER; note = uracil
  source 1..60: mol_type = other DNA
tctgtacggtgacaaggcgtnnnactnnntgatcctcactttcaatatcacgaagaccat

SEQ ID NO: 821 - DNA, 60 bp, synthetic construct
  misc_feature 1..60: note = Synthetic Primer
  misc_difference 21..23: note = n is a, c, g, t or u
  misc_difference 27..29: note = n is a, c, g, t or u
  modified_base 20: mod_base = OTHER; note = uracil
  modified_base 33: mod_base = OTHER; note = uracil
  modified_base 45: mod_base = OTHER; note = uracil
  modified_base 49: mod_base = OTHER; note = uracil
  modified_base 56: mod_base = OTHER; note = uracil
  modified_base 58..59: mod_base = OTHER; note = uracil
  source 1..60: mol_type = other DNA
tctgtacggtgacaaggcgtnnnactnnntgatgaagaaaccactggatggagaatattt

SEQ ID NO: 822 - DNA, 60 bp, synthetic construct
  misc_feature 1..60: note = Synthetic Primer
  misc_difference 21..23: note = n is a, c, g, t or u
  misc_difference 27..29: note = n is a, c, g, t or u
  modified_base 20: mod_base = OTHER; note = uracil
  modified_base 33: mod_base = OTHER; note = uracil
  modified_base 37: mod_base = OTHER; note = uracil
  modified_base 41: mod_base = OTHER; note = uracil
  modified_base 50: mod_base = OTHER; note = uracil
  source 1..60: mol_type = other DNA
tctgtacggtgacaaggcgtnnnactnnntgatagatcggtagccaagctggaaaagaca

SEQ ID NO: 823 - DNA, 60 bp, synthetic construct
  misc_feature 1..60: note = Synthetic Primer
  misc_difference 21..23: note = n is a, c, g, t or u
  misc_difference 27..29: note = n is a, c, g, t or u
  modified_base 20: mod_base = OTHER; note = uracil
  modified_base 33..34: mod_base = OTHER; note = uracil
  modified_base 37..38: mod_base = OTHER; note = uracil
  modified_base 41: mod_base = OTHER; note = uracil
  modified_base 44..46: mod_base = OTHER; note = uracil
  modified_base 54: mod_base = OTHER; note = uracil
  modified_base 58: mod_base = OTHER; note = uracil
  source 1..60: mol_type = other DNA
tctgtacggtgacaaggcgtnnnactnnntgattggttactagtttagaagaatccctga

SEQ ID NO: 824 - DNA, 60 bp, synthetic construct
  misc_feature 1..60: note = Synthetic Primer
  misc_difference 21..23: note = n is a, c, g, t or u
  misc_difference 27..29: note = n is a, c, g, t or u
  modified_base 20: mod_base = OTHER; note = uracil
  modified_base 33: mod_base = OTHER; note = uracil
  modified_base 37..38: mod_base = OTHER; note = uracil
  modified_base 40: mod_base = OTHER; note = uracil
  modified_base 46..47: mod_base = OTHER; note = uracil
  modified_base 59: mod_base = OTHER; note = uracil
  source 1..60: mol_type = other DNA
tctgtacggtgacaaggcgtnnnactnnntgatcagttatccaagttcccaacacagatc

SEQ ID NO: 825 - DNA, 60 bp, synthetic construct
  misc_feature 1..60: note = Synthetic Primer
  misc_difference 21..23: note = n is a, c, g, t or u
  misc_difference 27..29: note = n is a, c, g, t or u
  modified_base 20: mod_base = OTHER; note = uracil
  modified_base 33..34: mod_base = OTHER; note = uracil
  modified_base 36: mod_base = OTHER; note = uracil
  modified_base 46..48: mod_base = OTHER; note = uracil
  modified_base 56: mod_base = OTHER; note = uracil
  source 1..60: mol_type = other DNA
tctgtacggtgacaaggcgtnnnactnnntgattgtggaaaaagatttagcaggctagac

SEQ ID NO: 826 - DNA, 60 bp, synthetic construct
  misc_feature 1..60: note = Synthetic Primer
  misc_difference 21..23: note = n is a, c, g, t or u
  misc_difference 27..29: note = n is a, c, g, t or u
  modified_base 20: mod_base = OTHER; note = uracil
  modified_base 33: mod_base = OTHER; note = uracil
  modified_base 39: mod_base = OTHER; note = uracil
  modified_base 43: mod_base = OTHER; note = uracil
  modified_base 45: mod_base = OTHER; note = uracil
  modified_base 52: mod_base = OTHER; note = uracil
  modified_base 56..57: mod_base = OTHER; note = uracil
  source 1..60: mol_type = other DNA
tctgtacggtgacaaggcgtnnnactnnntgataagaatgaatctggcacatggattcag

SEQ ID NO: 827 - DNA, 60 bp, synthetic construct
  misc_feature 1..60: note = Synthetic Primer
  misc_difference 21..23: note = n is a, c, g, t or u
  misc_difference 27..29: note = n is a, c, g, t or u
  modified_base 20: mod_base = OTHER; note = uracil
  modified_base 33: mod_base = OTHER; note = uracil
  modified_base 38: mod_base = OTHER; note = uracil
  modified_base 41: mod_base = OTHER; note = uracil
  modified_base 48: mod_base = OTHER; note = uracil
  modified_base 50: mod_base = OTHER; note = uracil
  source 1..60: mol_type = other DNA
tctgtacggtgacaaggcgtnnnactnnntgatgccgtgatagaaaatatacagcgagaa

SEQ ID NO: 828 - DNA, 60 bp, synthetic construct
  misc_feature 1..60: note = Synthetic Primer
  misc_difference 21..23: note = n is a, c, g, t or u
  misc_difference 27..29: note = n is a, c, g, t or u
  modified_base 20: mod_base = OTHER; note = uracil
  modified_base 33..34: mod_base = OTHER; note = uracil
  modified_base 36: mod_base = OTHER; note = uracil
  modified_base 40: mod_base = OTHER; note = uracil
  modified_base 43: mod_base = OTHER; note = uracil
  modified_base 50..52: mod_base = OTHER; note = uracil
  modified_base 54: mod_base = OTHER; note = uracil
  source 1..60: mol_type = other DNA
tctgtacggtgacaaggcgtnnnactnnntgattgtggctcataaagcatttctgaaaaa

SEQ ID NO: 829 - DNA, 61 bp, synthetic construct
  misc_feature 1..61: note = Synthetic Primer
  misc_difference 21..23: note = n is a, c, g, t or u
  misc_difference 27..29: note = n is a, c, g, t or u
  modified_base 20: mod_base = OTHER; note = uracil
  modified_base 33: mod_base = OTHER; note = uracil
  modified_base 37: mod_base = OTHER; note = uracil
  modified_base 41: mod_base = OTHER; note = uracil
  modified_base 47..48: mod_base = OTHER; note = uracil
  modified_base 51: mod_base = OTHER; note = uracil
  modified_base 55: mod_base = OTHER; note = uracil
  modified_base 57: mod_base = OTHER; note = uracil
  source 1..61: mol_type = other DNA
tctgtacggtgacaaggcgtnnnactnnntgatgagtagctccaaattaatgaatgtgcat

SEQ ID NO: 830 - DNA, 61 bp, synthetic construct
  misc_feature 1..61: note = Synthetic Primer
  misc_difference 21..23: note = n is a, c, g, t or u
  misc_difference 27..29: note = n is a, c, g, t or u
  modified_base 20: mod_base = OTHER; note = uracil
  modified_base 33..34: mod_base = OTHER; note = uracil
  modified_base 36: mod_base = OTHER; note = uracil
  modified_base 39: mod_base = OTHER; note = uracil
  modified_base 41: mod_base = OTHER; note = uracil
  modified_base 43: mod_base = OTHER; note = uracil
  modified_base 48: mod_base = OTHER; note = uracil
  modified_base 54: mod_base = OTHER; note = uracil
  modified_base 57: mod_base = OTHER; note = uracil
  source 1..61: mol_type = other DNA
tctgtacggtgacaaggcgtnnnactnnntgattctcatgtctgaactgaagataatgact

SEQ ID NO: 831 - DNA, 61 bp, synthetic construct
  misc_feature 1..61: note = Synthetic Primer
  misc_difference 21..23: note = n is a, c, g, t or u
  misc_difference 27..29: note = n is a, c, g, t or u
  modified_base 20: mod_base = OTHER; note = uracil
  modified_base 33..34: mod_base = OTHER; note = uracil
  modified_base 42..43: mod_base = OTHER; note = uracil
  modified_base 46..47: mod_base = OTHER; note = uracil
  modified_base 49: mod_base = OTHER; note = uracil
  modified_base 51: mod_base = OTHER; note = uracil
  modified_base 53: mod_base = OTHER; note = uracil
  modified_base 55..56: mod_base = OTHER; note = uracil
  modified_base 60: mod_base = OTHER; note = uracil
  source 1..61: mol_type = other DNA
tctgtacggtgacaaggcgtnnnactnnntgattacccaaattgcttctgtctgttaaatg

SEQ ID NO: 832 - DNA, 61 bp, synthetic construct
  misc_feature 1..61: note = Synthetic Primer
  misc_difference 21..23: note = n is a, c, g, t or u
  misc_difference 27..29: note = n is a, c, g, t or u
  modified_base 20: mod_base = OTHER; note = uracil
  modified_base 33..34: mod_base = OTHER; note = uracil
  modified_base 38: mod_base = OTHER; note = uracil
  modified_base 41..44: mod_base = OTHER; note = uracil
  modified_base 46..49: mod_base = OTHER; note = uracil
  modified_base 51: mod_base = OTHER; note = uracil
  modified_base 54: mod_base = OTHER; note = uracil
  source 1..61: mol_type = other DNA
tctgtacggtgacaaggcgtnnnactnnntgattaaatggttttcttttctcctccaacct

SEQ ID NO: 833 - DNA, 61 bp, synthetic construct
  misc_feature 1..61: note = Synthetic Primer
  misc_difference 21..23: note = n is a, c, g, t or u
  misc_difference 27..29: note = n is a, c, g, t or u
  modified_base 20: mod_base = OTHER; note = uracil
  modified_base 33: mod_base = OTHER; note = uracil
  modified_base 35: mod_base = OTHER; note = uracil
  modified_base 38: mod_base = OTHER; note = uracil
  modified_base 41..42: mod_base = OTHER; note = uracil
  modified_base 45: mod_base = OTHER; note = uracil
  source 1..61: mol_type = other DNA
tctgtacggtgacaaggcgtnnnactnnntgatatagtgattagtaaaggagcccaagaat

SEQ ID NO: 834 - DNA, 61 bp, synthetic construct
  misc_feature 1..61: note = Synthetic Primer
  misc_difference 21..23: note = n is a, c, g, t or u
  misc_difference 27..29: note = n is a, c, g, t or u
  modified_base 20: mod_base = OTHER; note = uracil
  modified_base 33: mod_base = OTHER; note = uracil
  modified_base 36..37: mod_base = OTHER; note = uracil
  modified_base 41..42: mod_base = OTHER; note = uracil
  modified_base 45..46: mod_base = OTHER; note = uracil
  modified_base 52: mod_base = OTHER; note = uracil
  modified_base 59..60: mod_base = OTHER; note = uracil
  source 1..61: mol_type = other DNA
tctgtacggtgacaaggcgtnnnactnnntgataattaacttacttgccactgaaaagttg

SEQ ID NO: 835 - DNA, 61 bp, synthetic construct
  misc_feature 1..61: note = Synthetic Primer
  misc_difference 21..23: note = n is a, c, g, t or u
  misc_difference 27..29: note = n is a, c, g, t or u
  modified_base 20: mod_base = OTHER; note = uracil
  modified_base 33..34: mod_base = OTHER; note = uracil
  modified_base 37..38: mod_base = OTHER; note = uracil
  modified_base 41: mod_base = OTHER; note = uracil
  modified_base 48..49: mod_base = OTHER; note = uracil
  modified_base 54: mod_base = OTHER; note = uracil
  modified_base 58..59: mod_base = OTHER; note = uracil
  source 1..61: mol_type = other DNA
tctgtacggtgacaaggcgtnnnactnnntgattccttcctagagagttagagtaacttca

SEQ ID NO: 836 - DNA, 61 bp, synthetic construct
  misc_feature 1..61: note = Synthetic Primer
  misc_difference 21..23: note = n is a, c, g, t or u
  misc_difference 27..29: note = n is a, c, g, t or u
  modified_base 20: mod_base = OTHER; note = uracil
  modified_base 33: mod_base = OTHER; note = uracil
  modified_base 35: mod_base = OTHER; note = uracil
  modified_base 39..41: mod_base = OTHER; note = uracil
  modified_base 45..46: mod_base = OTHER; note = uracil
  modified_base 48: mod_base = OTHER; note = uracil
  modified_base 52: mod_base = OTHER; note = uracil
  modified_base 55: mod_base = OTHER; note = uracil
  modified_base 60: mod_base = OTHER; note = uracil
  source 1..61: mol_type = other DNA
tctgtacggtgacaaggcgtnnnactnnntgatatccctttgggttataaatagtgcactc

SEQ ID NO: 837 - DNA, 61 bp, synthetic construct
  misc_feature 1..61: note = Synthetic Primer
  misc_difference 21..23: note = n is a, c, g, t or u
  misc_difference 27..29: note = n is a, c, g, t or u
  modified_base 20: mod_base = OTHER; note = uracil
  modified_base 33: mod_base = OTHER; note = uracil
  modified_base 35: mod_base = OTHER; note = uracil
  modified_base 37..38: mod_base = OTHER; note = uracil
  modified_base 50: mod_base = OTHER; note = uracil
  source 1..61: mol_type = other DNA
tctgtacggtgacaaggcgtnnnactnnntgatatcttgacaaagcaaataaagacaaagc

SEQ ID NO: 838 - DNA, 61 bp, synthetic construct
  misc_feature 1..61: note = Synthetic Primer
  misc_difference 21..23: note = n is a, c, g, t or u
  misc_difference 27..29: note = n is a, c, g, t or u
  modified_base 20: mod_base = OTHER; note = uracil
  modified_base 33..35: mod_base = OTHER; note = uracil
  modified_base 45: mod_base = OTHER; note = uracil
  modified_base 59: mod_base = OTHER; note = uracil
  source 1..61: mol_type = other DNA
tctgtacggtgacaaggcgtnnnactnnntgatttaagggaaaatgacaaagaacagctca

SEQ ID NO: 839 - DNA, 61 bp, synthetic construct
  misc_feature 1..61: note = Synthetic Primer
  misc_difference 21..23: note = n is a, c, g, t or u
  misc_difference 27..29: note = n is a, c, g, t or u
  modified_base 20: mod_base = OTHER; note = uracil
  modified_base 33: mod_base = OTHER; note = uracil
  modified_base 45: mod_base = OTHER; note = uracil
  modified_base 47..50: mod_base = OTHER; note = uracil
  modified_base 55: mod_base = OTHER; note = uracil
  modified_base 57: mod_base = OTHER; note = uracil
  modified_base 59..60: mod_base = OTHER; note = uracil
  source 1..61: mol_type = other DNA
tctgtacggtgacaaggcgtnnnactnnntgatgggaagaaaagtgttttgaaatgtgttt

SEQ ID NO: 840 - DNA, 61 bp, synthetic construct
  misc_feature 1..61: note = Synthetic Primer
  misc_difference 21..23: note = n is a, c, g, t or u
  misc_difference 27..29: note = n is a, c, g, t or u
  modified_base 20: mod_base = OTHER; note = uracil
  modified_base 33..34: mod_base = OTHER; note = uracil
  modified_base 38: mod_base = OTHER; note = uracil
  modified_base 40..43: mod_base = OTHER; note = uracil
  modified_base 45: mod_base = OTHER; note = uracil
  modified_base 49: mod_base = OTHER; note = uracil
  modified_base 52: mod_base = OTHER; note = uracil
  modified_base 55..56: mod_base = OTHER; note = uracil
  modified_base 60: mod_base = OTHER; note = uracil
  source 1..61: mol_type = other DNA
tctgtacggtgacaaggcgtnnnactnnntgattaaatcttttctcaatgatgcttggctc

SEQ ID NO: 841 - DNA, 61 bp, synthetic construct
  misc_feature 1..61: note = Synthetic Primer
  misc_difference 21..23: note = n is a, c, g, t or u
  misc_difference 27..29: note = n is a, c, g, t or u
  modified_base 20: mod_base = OTHER; note = uracil
  modified_base 33: mod_base = OTHER; note = uracil
  modified_base 41: mod_base = OTHER; note = uracil
  modified_base 43: mod_base = OTHER; note = uracil
  modified_base 45: mod_base = OTHER; note = uracil
  modified_base 52: mod_base = OTHER; note = uracil
  modified_base 54..55: mod_base = OTHER; note = uracil
  modified_base 59..60: mod_base = OTHER; note = uracil
  source 1..61: mol_type = other DNA
tctgtacggtgacaaggcgtnnnactnnntgataaggaactgtgtgcaaaatcttcaattg

SEQ ID NO: 842 - DNA, 61 bp, synthetic construct
  misc_feature 1..61: note = Synthetic Primer
  misc_difference 21..23: note = n is a, c, g, t or u
  misc_difference 27..29: note = n is a, c, g, t or u
  modified_base 20: mod_base = OTHER; note = uracil
  modified_base 33: mod_base = OTHER; note = uracil
  modified_base 40: mod_base = OTHER; note = uracil
  modified_base 45: mod_base = OTHER; note = uracil
  modified_base 47: mod_base = OTHER; note = uracil
  modified_base 49: mod_base = OTHER; note = uracil
  source 1..61: mol_type = other DNA
tctgtacggtgacaaggcgtnnnactnnntgatcaagaataaaatgtctagcagcaagaag

SEQ ID NO: 843 - DNA, 61 bp, synthetic construct
  misc_feature 1..61: note = Synthetic Primer
  misc_difference 21..23: note = n is a, c, g, t or u
  misc_difference 27..29: note = n is a, c, g, t or u
  modified_base 20: mod_base = OTHER; note = uracil
  modified_base 33: mod_base = OTHER; note = uracil
  modified_base 37: mod_base = OTHER; note = uracil
  modified_base 42: mod_base = OTHER; note = uracil
  modified_base 44: mod_base = OTHER; note = uracil
  modified_base 49: mod_base = OTHER; note = uracil
  modified_base 51: mod_base = OTHER; note = uracil
  modified_base 53..54: mod_base = OTHER; note = uracil
  modified_base 58: mod_base = OTHER; note = uracil
  source 1..61: mol_type = other DNA
tctgtacggtgacaaggcgtnnnactnnntgatagatcagatctggactatattaggtccc

SEQ ID NO: 844 - DNA, 61 bp, synthetic construct
  misc_feature 1..61: note = Synthetic Primer
  misc_difference 21..23: note = n is a, c, g, t or u
  misc_difference 27..29: note = n is a, c, g, t or u
  modified_base 20: mod_base = OTHER; note = uracil
  modified_base 33: mod_base = OTHER; note = uracil
  modified_base 42: mod_base = OTHER; note = uracil
  modified_base 44: mod_base = OTHER; note = uracil
  modified_base 52: mod_base = OTHER; note = uracil
  modified_base 55: mod_base = OTHER; note = uracil
  modified_base 60: mod_base = OTHER; note = uracil
  source 1..61: mol_type = other DNA
tctgtacggtgacaaggcgtnnnactnnntgatggaacagatatccagaactagtgaactt

SEQ ID NO: 845 - DNA, 61 bp, synthetic construct
  misc_feature 1..61: note = Synthetic Primer
  misc_difference 21..23: note = n is a, c, g, t or u
  misc_difference 27..29: note = n is a, c, g, t or u
  modified_base 20: mod_base = OTHER; note = uracil
  modified_base 33: mod_base = OTHER; note = uracil
  modified_base 36: mod_base = OTHER; note = uracil
  modified_base 44..45: mod_base = OTHER; note = uracil
  modified_base 51: mod_base = OTHER; note = uracil
  modified_base 53: mod_base = OTHER; note = uracil
  source 1..61: mol_type = other DNA
tctgtacggtgacaaggcgtnnnactnnntgatggtgaagaacttaaaactgtgacagaga

SEQ ID NO: 846 - DNA, 61 bp, synthetic construct
  misc_feature 1..61: note = Synthetic Primer
  misc_difference 21..23: note = n is a, c, g, t or u
  misc_difference 27..29: note = n is a, c, g, t or u
  modified_base 20: mod_base = OTHER; note = uracil
  modified_base 33: mod_base = OTHER; note = uracil
  modified_base 36: mod_base = OTHER; note = uracil
  modified_base 47: mod_base = OTHER; note = uracil
  modified_base 52: mod_base = OTHER; note = uracil
  source 1..61: mol_type = other DNA
tctgtacggtgacaaggcgtnnnactnnntgatcctgaaaaccaaatacgatgaagaaact

SEQ ID NO: 847 - DNA, 61 bp, synthetic construct
  misc_feature 1..61: note = Synthetic Primer
  misc_difference 21..23: note = n is a, c, g, t or u
  misc_difference 27..29: note = n is a, c, g, t or u
  modified_base 20: mod_base = OTHER; note = uracil
  modified_base 33: mod_base = OTHER; note = uracil
  modified_base 35: mod_base = OTHER; note = uracil
  modified_base 37..38: mod_base = OTHER; note = uracil
  modified_base 45: mod_base = OTHER; note = uracil
  modified_base 47: mod_base = OTHER; note = uracil
  modified_base 50: mod_base = OTHER; note = uracil
  modified_base 55: mod_base = OTHER; note = uracil
  source 1..61: mol_type = other DNA
tctgtacggtgacaaggcgtnnnactnnntgatatgttgacaactatgatgacatcagaac

SEQ ID NO: 848 - DNA, 61 bp, synthetic construct
  misc_feature 1..61: note = Synthetic Primer
  misc_difference 21..23: note = n is a, c, g, t or u
  misc_difference 27..29: note = n is a, c, g, t or u
  modified_base 20: mod_base = OTHER; note = uracil
  modified_base 33: mod_base = OTHER; note = uracil
  modified_base 36: mod_base = OTHER; note = uracil
  modified_base 43..44: mod_base = OTHER; note = uracil
  modified_base 47: mod_base = OTHER; note = uracil
  modified_base 54..55: mod_base = OTHER; note = uracil
  modified_base 60: mod_base = OTHER; note = uracil
  source 1..61: mol_type = other DNA
tctgtacggtgacaaggcgtnnnactnnntgatcatgaagacttcctagagaattcacatc

SEQ ID NO: 849 - DNA, 61 bp, synthetic construct
  misc_feature 1..61: note = Synthetic Primer
  misc_difference 21..23: note = n is a, c, g, t or u
  misc_difference 27..29: note = n is a, c, g, t or u
  modified_base 20: mod_base = OTHER; note = uracil
  modified_base 33: mod_base = OTHER; note = uracil
  modified_base 35: mod_base = OTHER; note = uracil
  modified_base 47: mod_base = OTHER; note = uracil
  source 1..61: mol_type = other DNA
tctgtacggtgacaaggcgtnnnactnnntgatataaaggacaaggtaagaagaagacaag

SEQ ID NO: 850 - DNA, 61 bp, synthetic construct
  misc_feature 1..61: note = Synthetic Primer
  misc_difference 21..23: note = n is a, c, g, t or u
  misc_difference 27..29: note = n is a, c, g, t or u
  modified_base 20: mod_base = OTHER; note = uracil
  modified_base 33: mod_base = OTHER; note = uracil
  modified_base 38: mod_base = OTHER; note = uracil
  modified_base 47: mod_base = OTHER; note = uracil
  modified_base 50: mod_base = OTHER; note = uracil
  modified_base 54: mod_base = OTHER; note = uracil
  modified_base 56: mod_base = OTHER; note = uracil
  modified_base 58..59: mod_base = OTHER; note = uracil
  source 1..61: mol_type = other DNA
tctgtacggtgacaaggcgtnnnactnnntgatgaactggagaagatgatgactatgttga

SEQ ID NO: 851 - DNA, 61 bp, synthetic construct
  misc_feature 1..61: note = Synthetic Primer
  misc_difference 21..23: note = n is a, c, g, t or u
  misc_difference 27..29: note = n is a, c, g, t or u
  modified_base 20: mod_base = OTHER; note = uracil
  modified_base 33: mod_base = OTHER; note = uracil
  modified_base 37: mod_base = OTHER; note = uracil
  modified_base 39: mod_base = OTHER; note = uracil
  modified_base 48: mod_base = OTHER; note = uracil
  modified_base 50: mod_base = OTHER; note = uracil
  modified_base 52: mod_base = OTHER; note = uracil
  modified_base 54..55: mod_base = OTHER; note = uracil
  modified_base 58..60: mod_base = OTHER; note = uracil
  source 1..61: mol_type = other DNA
tctgtacggtgacaaggcgtnnnactnnntgatacctgtgaagaaaatgtgtgttgatttt

SEQ ID NO: 852 - DNA, 61 bp, synthetic construct
  misc_feature 1..61: note = Synthetic Primer
  misc_difference 21..23: note = n is a, c, g, t or u
  misc_difference 27..29: note = n is a, c, g, t or u
  modified_base 20: mod_base = OTHER; note = uracil
  modified_base 33: mod_base = OTHER; note = uracil
  modified_base 35: mod_base = OTHER; note = uracil
  modified_base 49: mod_base = OTHER; note = uracil
  source 1..61: mol_type = other DNA
tctgtacggtgacaaggcgtnnnactnnntgatctcaacaaacaggactaaggaaaggaaa

SEQ ID NO: 853 - DNA, 61 bp, synthetic construct
  misc_feature 1..61: note = Synthetic Primer
  misc_difference 21..23: note = n is a, c, g, t or u
  misc_difference 27..29: note = n is a, c, g, t or u
  modified_base 20: mod_base = OTHER; note = uracil
  modified_base 33..34: mod_base = OTHER; note = uracil
  modified_base 36: mod_base = OTHER; note = uracil
  modified_base 39: mod_base = OTHER; note = uracil
  modified_base 44: mod_base = OTHER; note = uracil
  modified_base 56..57: mod_base = OTHER; note = uracil
  source 1..61: mol_type = other DNA
tctgtacggtgacaaggcgtnnnactnnntgattctactcagctgaaaagcagagttaaaa

SEQ ID NO: 854 - DNA, 61 bp, synthetic construct
  misc_feature 1..61: note = Synthetic Primer
  misc_difference 21..23: note = n is a, c, g, t or u
  misc_difference 27..29: note = n is a, c, g, t or u
  modified_base 20: mod_base = OTHER; note = uracil
  modified_base 33: mod_base = OTHER; note = uracil
  modified_base 37..38: mod_base = OTHER; note = uracil
  modified_base 40: mod_base = OTHER; note = uracil
  modified_base 47: mod_base = OTHER; note = uracil
  modified_base 49: mod_base = OTHER; note = uracil
  modified_base 51..52: mod_base = OTHER; note = uracil
  modified_base 55..58: mod_base = OTHER; note = uracil
  source 1..61: mol_type = other DNA
tctgtacggtgacaaggcgtnnnactnnntgataggttctcacccatatattgattttcgt

SEQ ID NO: 855 - DNA, 61 bp, synthetic construct
  misc_feature 1..61: note = Synthetic Primer
  misc_difference 21..23: note = n is a, c, g, t or u
  misc_difference 27..29: note = n is a, c, g, t or u
  modified_base 20: mod_base = OTHER; note = uracil
  modified_base 33: mod_base = OTHER; note = uracil
  modified_base 41: mod_base = OTHER; note = uracil
  modified_base 48..50: mod_base = OTHER; note = uracil
  modified_base 52..53: mod_base = OTHER; note = uracil
  modified_base 58: mod_base = OTHER; note = uracil
  source 1..61: mol_type = other DNA
tctgtacggtgacaaggcgtnnnactnnntgatcagaaaatgaagagtttgttgaagtggg

SEQ ID NO: 856 - DNA, 61 bp, synthetic construct
  misc_feature 1..61: note = Synthetic Primer
  misc_difference 21..23: note = n is a, c, g, t or u
  misc_difference 27..29: note = n is a, c, g, t or u
  modified_base 20: mod_base = OTHER; note = uracil
  modified_base 33: mod_base = OTHER; note = uracil
  modified_base 38..39: mod_base = OTHER; note = uracil
  modified_base 42: mod_base = OTHER; note = uracil
  modified_base 49..51: mod_base = OTHER; note = uracil
  modified_base 54: mod_base = OTHER; note = uracil
  source 1..61: mol_type = other DNA
tctgtacggtgacaaggcgtnnnactnnntgatccagttcctagcagatttaatagacgag

SEQ ID NO: 857 - DNA, 61 bp, synthetic construct
  misc_feature 1..61: note = Synthetic Primer
  misc_difference 21..23: note = n is a, c, g, t or u
  misc_difference 27..29: note = n is a, c, g, t or u
  modified_base 20: mod_base = OTHER; note = uracil
  modified_base 33: mod_base = OTHER; note = uracil
  modified_base 39..40: mod_base = OTHER; note = uracil
  modified_base 44: mod_base = OTHER; note = uracil
  modified_base 46..47: mod_base = OTHER; note = uracil
  modified_base 49..51: mod_base = OTHER; note = uracil
  modified_base 57: mod_base = OTHER; note = uracil
  modified_base 59: mod_base = OTHER; note = uracil
  source 1..61: mol_type = other DNA
tctgtacggtgacaaggcgtnnnactnnntgatgggaattggctattctttacaactgtac

SEQ ID NO: 858 - DNA, 61 bp, synthetic construct
  misc_feature 1..61: note = Synthetic Primer
  misc_difference 21..23: note = n is a, c, g, t or u
  misc_difference 27..29: note = n is a, c, g, t or u
  modified_base 20: mod_base = OTHER; note = uracil
  modified_base 33: mod_base = OTHER; note = uracil
  modified_base 37..39: mod_base = OTHER; note = uracil
  modified_base 45: mod_base = OTHER; note = uracil
  modified_base 47..48: mod_base = OTHER; note = uracil
  modified_base 52: mod_base = OTHER; note = uracil
  source 1..61: mol_type = other DNA
tctgtacggtgacaaggcgtnnnactnnntgatggatttcaaagtgttacctcaagaagca

SEQ ID NO: 859 - DNA, 61 bp, synthetic construct
  misc_feature 1..61: note = Synthetic Primer
  misc_difference 21..23: note = n is a, c, g, t or u
  misc_difference 27..29: note = n is a, c, g, t or u
  modified_base 20: mod_base = OTHER; note = uracil
  modified_base 33: mod_base = OTHER; note = uracil
  modified_base 42..43: mod_base = OTHER; note = uracil
  modified_base 47: mod_base = OTHER; note = uracil
  modified_base 56: mod_base = OTHER; note = uracil
  modified_base 58: mod_base = OTHER; note = uracil
  source 1..61: mol_type = other DNA
tctgtacggtgacaaggcgtnnnactnnntgatggacagaattgaatcagggagatatgaa

SEQ ID NO: 860 - DNA, 61 bp, synthetic construct
  misc_feature 1..61: note = Synthetic Primer
  misc_difference 21..23: note = n is a, c, g, t or u
  misc_difference 27..29: note = n is a, c, g, t or u
  modified_base 20: mod_base = OTHER; note = uracil
  modified_base 33: mod_base = OTHER; note = uracil
  modified_base 36: mod_base = OTHER; note = uracil
  modified_base 38: mod_base = OTHER; note = uracil
  modified_base 41: mod_base = OTHER; note = uracil
  modified_base 44: mod_base = OTHER; note = uracil
  modified_base 51..52: mod_base = OTHER; note = uracil
  source 1..61: mol_type = other DNA
tctgtacggtgacaaggcgtnnnactnnntgatcatatagtgatcagagattaaggccaag

SEQ ID NO: 861 - DNA, 61 bp, synthetic construct
  misc_feature 1..61: note = Synthetic Primer
  misc_difference 21..23: note = n is a, c, g, t or u
  misc_difference 27..29: note = n is a, c, g, t or u
  modified_base 20: mod_base = OTHER; note = uracil
  modified_base 33: mod_base = OTHER; note = uracil
  modified_base 37: mod_base = OTHER; note = uracil
  modified_base 42..43: mod_base = OTHER; note = uracil
  modified_base 53: mod_base = OTHER; note = uracil
  modified_base 58: mod_base = OTHER; note = uracil
  source 1..61: mol_type = other DNA
tctgtacggtgacaaggcgtnnnactnnntgatacataaaattcacaggaaatcagatcca

SEQ ID NO: 862 - DNA, 61 bp, synthetic construct
  misc_feature 1..61: note = Synthetic Primer
  misc_difference 21..23: note = n is a, c, g, t or u
  misc_difference 27..29: note = n is a, c, g, t or u
  modified_base 20: mod_base = OTHER; note = uracil
  modified_base 33: mod_base = OTHER; note = uracil
  modified_base 35..38: mod_base = OTHER; note = uracil
  modified_base 46: mod_base = OTHER; note = uracil
  modified_base 48: mod_base = OTHER; note = uracil
  source 1..61: mol_type = other DNA
tctgtacggtgacaaggcgtnnnactnnntgatcttttcaggaggtgtaaaacaagaaaaa

SEQ ID NO: 863 - DNA, 61 bp, synthetic construct
  misc_feature 1..61: note = Synthetic Primer
  misc_difference 21..23: note = n is a, c, g, t or u
  misc_difference 27..29: note = n is a, c, g, t or u
  modified_base 20: mod_base = OTHER; note = uracil
  modified_base 33..35: mod_base = OTHER; note = uracil
  modified_base 42: mod_base = OTHER; note = uracil
  modified_base 52..53: mod_base = OTHER; note = uracil
  modified_base 60: mod_base = OTHER; note = uracil
  source 1..61: mol_type = other DNA
tctgtacggtgacaaggcgtnnnactnnntgatttgaaaaatggcaaagaattcaaacctg

SEQ ID NO: 864 - DNA, 62 bp, synthetic construct
  misc_feature 1..62: note = Synthetic Primer
  misc_difference 21..23: note = n is a, c, g, t or u
  misc_difference 27..29: note = n is a, c, g, t or u
  modified_base 20: mod_base = OTHER; note = uracil
  modified_base 33..34: mod_base = OTHER; note = uracil
  modified_base 36: mod_base = OTHER; note = uracil
  modified_base 38..39: mod_base = OTHER; note = uracil
  modified_base 43..46: mod_base = OTHER; note = uracil
  modified_base 48..49: mod_base = OTHER; note = uracil
  modified_base 54..55: mod_base = OTHER; note = uracil
  modified_base 57: mod_base = OTHER; note = uracil
  modified_base 61: mod_base = OTHER; note = uracil
  source 1..62: mol_type = other DNA
tctgtacggtgacaaggcgtnnnactnnntgattctgttcaattttgttgagcttctgaatt

SEQ ID NO: 865 - DNA, 62 bp, synthetic construct
  misc_feature 1..62: note = Synthetic Primer
  misc_difference 21..23: note = n is a, c, g, t or u
  misc_difference 27..29: note = n is a, c, g, t or u
  modified_base 20: mod_base = OTHER; note = uracil
  modified_base 33..34: mod_base = OTHER; note = uracil
  modified_base 37: mod_base = OTHER; note = uracil
  modified_base 47: mod_base = OTHER; note = uracil
  modified_base 53: mod_base = OTHER; note = uracil
  modified_base 55: mod_base = OTHER; note = uracil
  modified_base 58: mod_base = OTHER; note = uracil
  source 1..62: mol_type = other DNA
tctgtacggtgacaaggcgtnnnactnnntgattgatcgggaagcataagaatatcatcaac

SEQ ID NO: 866 - DNA, 62 bp, synthetic construct
  misc_feature 1..62: note = Synthetic Primer
  misc_difference 21..23: note = n is a, c, g, t or u
  misc_difference 27..29: note = n is a, c, g, t or u
  modified_base 20: mod_base = OTHER; note = uracil
  modified_base 33..35: mod_base = OTHER; note = uracil
  modified_base 37..39: mod_base = OTHER; note = uracil
  modified_base 41..42: mod_base = OTHER; note = uracil
  modified_base 45: mod_base = OTHER; note = uracil
  modified_base 47: mod_base = OTHER; note = uracil
  modified_base 49: mod_base = OTHER; note = uracil
  modified_base 52..53: mod_base = OTHER; note = uracil
  modified_base 55: mod_base = OTHER; note = uracil
  modified_base 60: mod_base = OTHER; note = uracil
  source 1..62: mol_type = other DNA
tctgtacggtgacaaggcgtnnnactnnntgatttatttattggtctctcattctcccatcc

SEQ ID NO: 867 - DNA, 62 bp, synthetic construct
  misc_feature 1..62: note = Synthetic Primer
  misc_difference 21..23: note = n is a, c, g, t or u
  misc_difference 27..29: note = n is a, c, g, t or u
  modified_base 20: mod_base = OTHER; note = uracil
  modified_base 33: mod_base = OTHER; note = uracil
  modified_base 40: mod_base = OTHER; note = uracil
  modified_base 44: mod_base = OTHER; note = uracil
  modified_base 46: mod_base = OTHER; note = uracil
  modified_base 49: mod_base = OTHER; note = uracil
  modified_base 51: mod_base = OTHER; note = uracil
  source 1..62: mol_type = other DNA
tctgtacggtgacaaggcgtnnnactnnntgatcccaagtacatatcctgtaagaccagaat

SEQ ID NO: 868 - DNA, 62 bp, synthetic construct
  misc_feature 1..62: note = Synthetic Primer
  misc_difference 21..23: note = n is a, c, g, t or u
  misc_difference 27..29: note = n is a, c, g, t or u
  modified_base 20: mod_base = OTHER; note = uracil
  modified_base 33: mod_base = OTHER; note = uracil
  modified_base 40: mod_base = OTHER; note = uracil
  modified_base 43: mod_base = OTHER; note = uracil
  modified_base 45..47: mod_base = OTHER; note = uracil
  modified_base 50..51: mod_base = OTHER; note = uracil
  modified_base 53..54: mod_base = OTHER; note = uracil
  modified_base 57: mod_base = OTHER; note = uracil
  source 1..62: mol_type = other DNA
tctgtacggtgacaaggcgtnnnactnnntgatggagcctaatctttcattattactgggaa

SEQ ID NO: 869 - DNA, 62 bp, synthetic construct
  misc_feature 1..62: note = Synthetic Primer
  misc_difference 21..23: note = n is a, c, g, t or u
  misc_difference 27..29: note = n is a, c, g, t or u
  modified_base 20: mod_base = OTHER; note = uracil
  modified_base 33: mod_base = OTHER; note = uracil
  modified_base 40..41: mod_base = OTHER; note = uracil
  modified_base 43..44: mod_base = OTHER; note = uracil
  modified_base 49: mod_base = OTHER; note = uracil
  modified_base 51..53: mod_base = OTHER; note = uracil
  source 1..62: mol_type = other DNA
tctgtacggtgacaaggcgtnnnactnnntgataacgggttattaacatatttcagagcaac

SEQ ID NO: 870 - DNA, 62 bp, synthetic construct
  misc_feature 1..62: note = Synthetic Primer
  misc_difference 21..23: note = n is a, c, g, t or u
  misc_difference 27..29: note = n is a, c, g, t or u
  modified_base 20: mod_base = OTHER; note = uracil
  modified_base 33: mod_base = OTHER; note = uracil
  modified_base 45..47: mod_base = OTHER; note = uracil
  modified_base 50..51: mod_base = OTHER; note = uracil
  modified_base 54: mod_base = OTHER; note = uracil
  modified_base 57..58: mod_base = OTHER; note = uracil
  source 1..62: mol_type = other DNA
tctgtacggtgacaaggcgtnnnactnnntgatcaaagcagggatttcattcatcattaaga

SEQ ID NO: 871 - DNA, 62 bp, synthetic construct
  misc_feature 1..62: note = Synthetic Primer
  misc_difference 21..23: note = n is a, c, g, t or u
  misc_difference 27..29: note = n is a, c, g, t or u
  modified_base 20: mod_base = OTHER; note = uracil
  modified_base 33: mod_base = OTHER; note = uracil
  modified_base 36: mod_base = OTHER; note = uracil
  modified_base 38: mod_base = OTHER; note = uracil
  modified_base 42: mod_base = OTHER; note = uracil
  modified_base 48: mod_base = OTHER; note = uracil
  modified_base 50..52: mod_base = OTHER; note = uracil
  source 1..62: mol_type = other DNA
tctgtacggtgacaaggcgtnnnactnnntgatcctgtaaatacgaatctttccaaaggaga

SEQ ID NO: 872 - DNA, 62 bp, synthetic construct
  misc_feature 1..62: note = Synthetic Primer
  misc_difference 21..23: note = n is a, c, g, t or u
  misc_difference 27..29: note = n is a, c, g, t or u
  modified_base 20: mod_base = OTHER; note = uracil
  modified_base 33..35: mod_base = OTHER; note = uracil
  modified_base 43..45: mod_base = OTHER; note = uracil
  modified_base 51: mod_base = OTHER; note = uracil
  modified_base 53..56: mod_base = OTHER; note = uracil
  source 1..62: mol_type = other DNA
tctgtacggtgacaaggcgtnnnactnnntgatttgaaagcgtttgagaatcttttaggaca

SEQ ID NO: 873 - DNA, 62 bp, synthetic construct
  misc_feature 1..62: note = Synthetic Primer
  misc_difference 21..23: note = n is a, c, g, t or u
  misc_difference 27..29: note = n is a, c, g, t or u
  modified_base 20: mod_base = OTHER; note = uracil
  modified_base 33: mod_base = OTHER; note = uracil
  modified_base 37..38: mod_base = OTHER; note = uracil
  modified_base 44..46: mod_base = OTHER; note = uracil
  modified_base 52: mod_base = OTHER; note = uracil
  modified_base 58: mod_base = OTHER; note = uracil
  source 1..62: mol_type = other DNA
tctgtacggtgacaaggcgtnnnactnnntgataagttgaagatttaccactgaaactgaca

SEQ ID NO: 874 - DNA, 62 bp, synthetic construct
  misc_feature 1..62: note = Synthetic Primer
  misc_difference 21..23: note = n is a, c, g, t or u
  misc_difference 27..29: note = n is a, c, g, t or u
  modified_base 20: mod_base = OTHER; note = uracil
  modified_base 33: mod_base = OTHER; note = uracil
  modified_base 36..40: mod_base = OTHER; note = uracil
  modified_base 48: mod_base = OTHER; note = uracil
  modified_base 55: mod_base = OTHER; note = uracil
  modified_base 57: mod_base = OTHER; note = uracil
  modified_base 59: mod_base = OTHER; note = uracil
  source 1..62: mol_type = other DNA
tctgtacggtgacaaggcgtnnnactnnntgatcctttttggaaacatacaggatatctacc

SEQ ID NO: 875 - DNA, 62 bp, synthetic construct
  misc_feature 1..62: note = Synthetic Primer
  misc_difference 21..23: note = n is a, c, g, t or u
  misc_difference 27..29: note = n is a, c, g, t or u
  modified_base 20: mod_base = OTHER; note = uracil
  modified_base 33: mod_base = OTHER; note = uracil
  modified_base 39: mod_base = OTHER; note = uracil
  modified_base 42..43: mod_base = OTHER; note = uracil
  modified_base 55: mod_base = OTHER; note = uracil
  modified_base 57: mod_base = OTHER; note = uracil
  source 1..62: mol_type = other DNA
tctgtacggtgacaaggcgtnnnactnnntgataccaatacttcagaagacaaatgtgaaaa

SEQ ID NO: 876 - DNA, 62 bp, synthetic construct
  misc_feature 1..62: note = Synthetic Primer
  misc_difference 21..23: note = n is a, c, g, t or u
  misc_difference 27..29: note = n is a, c, g, t or u
  modified_base 20: mod_base = OTHER; note = uracil
  modified_base 33: mod_base = OTHER; note = uracil
  modified_base 36..37: mod_base = OTHER; note = uracil
  modified_base 47: mod_base = OTHER; note = uracil
  modified_base 51: mod_base = OTHER; note = uracil
  modified_base 59: mod_base = OTHER; note = uracil
  modified_base 61: mod_base = OTHER; note = uracil
  source 1..62: mol_type = other DNA
tctgtacggtgacaaggcgtnnnactnnntgatgattgaagaagcatacatgacaaaatgtg

SEQ ID NO: 877 - DNA, 62 bp, synthetic construct
  misc_feature 1..62: note = Synthetic Primer
  misc_difference 21..23: note = n is a, c, g, t or u
  misc_difference 27..29: note = n is a, c, g, t or u
  modified_base 20: mod_base = OTHER; note = uracil
  modified_base 33..34: mod_base = OTHER; note = uracil
  modified_base 37..39: mod_base = OTHER; note = uracil
  modified_base 43..46: mod_base = OTHER; note = uracil
  modified_base 49: mod_base = OTHER; note = uracil
  modified_base 53..54: mod_base = OTHER; note = uracil
  source 1..62: mol_type = other DNA
tctgtacggtgacaaggcgtnnnactnnntgattgatttggattttcctgccttaagaaaaa

SEQ ID NO: 878 - DNA, 62 bp, synthetic construct
  misc_feature 1..62: note = Synthetic Primer
  misc_difference 21..23: note = n is a, c, g, t or u
  misc_difference 27..29: note = n is a, c, g, t or u
  modified_base 20: mod_base = OTHER; note = uracil
  modified_base 33: mod_base = OTHER; note = uracil
  modified_base 36: mod_base = OTHER; note = uracil
  modified_base 44..46: mod_base = OTHER; note = uracil
  source 1..62: mol_type = other DNA
tctgtacggtgacaaggcgtnnnactnnntgatggtacaaacatttcaagaagacaaaagat

SEQ ID NO: 879 - DNA, 62 bp, synthetic construct
  misc_feature 1..62: note = Synthetic Primer
  misc_difference 21..23: note = n is a, c, g, t or u
  misc_difference 27..29: note = n is a, c, g, t or u
  modified_base 20: mod_base = OTHER; note = uracil
  modified_base 33..34: mod_base = OTHER; note = uracil
  modified_base 36: mod_base = OTHER; note = uracil
  modified_base 39: mod_base = OTHER; note = uracil
  modified_base 42..44: mod_base = OTHER; note = uracil
  modified_base 51: mod_base = OTHER; note = uracil
  modified_base 54: mod_base = OTHER; note = uracil
  source 1..62: mol_type = other DNA
tctgtacggtgacaaggcgtnnnactnnntgattgtgataatttgcaacatagtaagaaggg

SEQ ID NO: 880 - DNA, 62 bp, synthetic construct
  misc_feature 1..62: note = Synthetic Primer
  misc_difference 21..23: note = n is a, c, g, t or u
  misc_difference 27..29: note = n is a, c, g, t or u
  modified_base 20: mod_base = OTHER; note = uracil
  modified_base 33: mod_base = OTHER; note = uracil
  modified_base 38: mod_base = OTHER; note = uracil
  modified_base 44: mod_base = OTHER; note = uracil
  modified_base 46..47: mod_base = OTHER; note = uracil
  modified_base 50: mod_base = OTHER; note = uracil
  modified_base 52..53: mod_base = OTHER; note = uracil
  modified_base 56: mod_base = OTHER; note = uracil
  modified_base 59: mod_base = OTHER; note = uracil
  source 1..62: mol_type = other DNA
tctgtacggtgacaaggcgtnnnactnnntgatacagtcagaatattcctgttcctactaca

SEQ ID NO: 881 - DNA, 63 bp, synthetic construct
  misc_feature 1..63: note = Synthetic Primer
  misc_difference 21..23: note = n is a, c, g, t or u
  misc_difference 27..29: note = n is a, c, g, t or u
  modified_base 20: mod_base = OTHER; note = uracil
  modified_base 33: mod_base = OTHER; note = uracil
  modified_base 35: mod_base = OTHER; note = uracil
  modified_base 37: mod_base = OTHER; note = uracil
  modified_base 43: mod_base = OTHER; note = uracil
  modified_base 48: mod_base = OTHER; note = uracil
  modified_base 50..51: mod_base = OTHER; note = uracil
  modified_base 53..54: mod_base = OTHER; note = uracil
  source 1..63: mol_type = other DNA
tctgtacggtgacaaggcgtnnnactnnntgatgtctcaaagtaaactattgttagcaaccat

SEQ ID NO: 882 - DNA, 63 bp, synthetic construct
  misc_feature 1..63: note = Synthetic Primer
  misc_difference 21..23: note = n is a, c, g, t or u
  misc_difference 27..29: note = n is a, c, g, t or u
  modified_base 20: mod_base = OTHER; note = uracil
  modified_base 33: mod_base = OTHER; note = uracil
  modified_base 37: mod_base = OTHER; note = uracil
  modified_base 43..44: mod_base = OTHER; note = uracil
  modified_base 47..49: mod_base = OTHER; note = uracil
  modified_base 51..52: mod_base = OTHER; note = uracil
  source 1..63: mol_type = other DNA
tctgtacggtgacaaggcgtnnnactnnntgatcaatgcaaattagtttcttgcaagagaaaa

SEQ ID NO: 883 - DNA, 63 bp, synthetic construct
  misc_feature 1..63: note = Synthetic Primer
  misc_difference 21..23: note = n is a, c, g, t or u
  misc_difference 27..29: note = n is a, c, g, t or u
  modified_base 20: mod_base = OTHER; note = uracil
  modified_base 33..34: mod_base = OTHER; note = uracil
  modified_base 37: mod_base = OTHER; note = uracil
  modified_base 42..43: mod_base = OTHER; note = uracil
  modified_base 54: mod_base = OTHER; note = uracil
  modified_base 58: mod_base = OTHER; note = uracil
  modified_base 60: mod_base = OTHER; note = uracil
  source 1..63: mol_type = other DNA
tctgtacggtgacaaggcgtnnnactnnntgattgataaacttcagaaagaactcaatgtact

SEQ ID NO: 884 - DNA, 63 bp, synthetic construct
  misc_feature 1..63: note = Synthetic Primer
  misc_difference 21..23: note = n is a, c, g, t or u
  misc_difference 27..29: note = n is a, c, g, t or u
  modified_base 20: mod_base = OTHER; note = uracil
  modified_base 33: mod_base = OTHER; note = uracil
  modified_base 37: mod_base = OTHER; note = uracil
  modified_base 45: mod_base = OTHER; note = uracil
  modified_base 47: mod_base = OTHER; note = uracil
  modified_base 49: mod_base = OTHER; note = uracil
  modified_base 54: mod_base = OTHER; note = uracil
  modified_base 56..57: mod_base = OTHER; note = uracil
  modified_base 59..61: mod_base = OTHER; note = uracil
  source 1..63: mol_type = other DNA
tctgtacggtgacaaggcgtnnnactnnntgataactggagagatatgtcaagtcttgtttac

SEQ ID NO: 885 - DNA, 63 bp, synthetic construct
  misc_feature 1..63: note = Synthetic Primer
  misc_difference 21..23: note = n is a, c, g, t or u
  misc_difference 27..29: note = n is a, c, g, t or u
  modified_base 20: mod_base = OTHER; note = uracil
  modified_base 33: mod_base = OTHER; note = uracil
  modified_base 36: mod_base = OTHER; note = uracil
  modified_base 47..48: mod_base = OTHER; note = uracil
  modified_base 54..55: mod_base = OTHER; note = uracil
  modified_base 57: mod_base = OTHER; note = uracil
  modified_base 59: mod_base = OTHER; note = uracil
  source 1..63: mol_type = other DNA
tctgtacggtgacaaggcgtnnnactnnntgatgatgacaaaaagcttcagagttctctaaaa

SEQ ID NO: 886 - DNA, 63 bp, synthetic construct
  misc_feature 1..63: note = Synthetic Primer
  misc_difference 21..23: note = n is a, c, g, t or u
  misc_difference 27..29: note = n is a, c, g, t or u
  modified_base 20: mod_base = OTHER; note = uracil
  modified_base 33: mod_base = OTHER; note = uracil
  modified_base 35: mod_base = OTHER; note = uracil
  modified_base 51..52: mod_base = OTHER; note = uracil
  modified_base 55: mod_base = OTHER; note = uracil
  modified_base 59: mod_base = OTHER; note = uracil
  modified_base 62: mod_base = OTHER; note = uracil
  source 1..63: mol_type = other DNA
tctgtacggtgacaaggcgtnnnactnnntgatatgagaaagaagaagaattcctcactaatg

SEQ ID NO: 887 - DNA, 63 bp, synthetic construct
  misc_feature 1..63: note = Synthetic Primer
  misc_difference 21..23: note = n is a, c, g, t or u
  misc_difference 27..29: note = n is a, c, g, t or u
  modified_base 20: mod_base = OTHER; note = uracil
  modified_base 33..34: mod_base = OTHER; note = uracil
  modified_base 50: mod_base = OTHER; note = uracil
  modified_base 54..55: mod_base = OTHER; note = uracil
  modified_base 58: mod_base = OTHER; note = uracil
  source 1..63: mol_type = other DNA
tctgtacggtgacaaggcgtnnnactnnntgattgaaaagaacaagagatgaattgatagagt

SEQ ID NO: 888 - DNA, 63 bp, synthetic construct
  misc_feature 1..63: note = Synthetic Primer
  misc_difference 21..23: note = n is a, c, g, t or u
  misc_difference 27..29: note = n is a, c, g, t or u
  modified_base 20: mod_base = OTHER; note = uracil
  modified_base 33..34: mod_base = OTHER; note = uracil
  modified_base 36: mod_base = OTHER; note = uracil
  modified_base 42..44: mod_base = OTHER; note = uracil
  modified_base 54: mod_base = OTHER; note = uracil
  modified_base 58..61: mod_base = OTHER; note = uracil
  source 1..63: mol_type = other DNA
tctgtacggtgacaaggcgtnnnactnnntgattatgcaaatttcacagagcctcagttttat

SEQ ID NO: 889 - DNA, 63 bp, synthetic construct
  misc_feature 1..63: note = Synthetic Primer
  misc_difference 21..23: note = n is a, c, g, t or u
  misc_difference 27..29: note = n is a, c, g, t or u
  modified_base 20: mod_base = OTHER; note = uracil
  modified_base 33..34: mod_base = OTHER; note = uracil
  modified_base 37: mod_base = OTHER; note = uracil
  modified_base 46..47: mod_base = OTHER; note = uracil
  modified_base 56: mod_base = OTHER; note = uracil
  source 1..63: mol_type = other DNA
tctgtacggtgacaaggcgtnnnactnnntgattaataccaaaagttaccaaaactgcagaca

SEQ ID NO: 890 - DNA, 63 bp, synthetic construct
  misc_feature 1..63: note = Synthetic Primer
  misc_difference 21..23: note = n is a, c, g, t or u
  misc_difference 27..29: note = n is a, c, g, t or u
  modified_base 20: mod_base = OTHER; note = uracil
  modified_base 33: mod_base = OTHER; note = uracil
  modified_base 44..46: mod_base = OTHER; note = uracil
  modified_base 48: mod_base = OTHER; note = uracil
  modified_base 50: mod_base = OTHER; note = uracil
  modified_base 56: mod_base = OTHER; note = uracil
  modified_base 60: mod_base = OTHER; note = uracil
  source 1..63: mol_type = other DNA
tctgtacggtgacaaggcgtnnnactnnntgatgaagaagacctttctgtggaaatagatgac

SEQ ID NO: 891 - DNA, 63 bp, synthetic construct
  misc_feature 1..63: note = Synthetic Primer
  misc_difference 21..23: note = n is a, c, g, t or u
  misc_difference 27..29: note = n is a, c, g, t or u
  modified_base 20: mod_base = OTHER; note = uracil
  modified_base 33..35: mod_base = OTHER; note = uracil
  modified_base 41..42: mod_base = OTHER; note = uracil
  modified_base 44: mod_base = OTHER; note = uracil
  modified_base 50: mod_base = OTHER; note = uracil
  modified_base 59..60: mod_base = OTHER; note = uracil
  source 1..63: mol_type = other DNA
tctgtacggtgacaaggcgtnnnactnnntgatttggaaattatggaaatcaagcaacttcaa

SEQ ID NO: 892 - DNA, 63 bp, synthetic construct
  misc_feature 1..63: note = Synthetic Primer
  misc_difference 21..23: note = n is a, c, g, t or u
  misc_difference 27..29: note = n is a, c, g, t or u
  modified_base 20: mod_base = OTHER; note = uracil
  modified_base 33: mod_base = OTHER; note = uracil
  modified_base 35: mod_base = OTHER; note = uracil
  modified_base 49..50: mod_base = OTHER; note = uracil
  modified_base 54: mod_base = OTHER; note = uracil
  modified_base 59..60: mod_base = OTHER; note = uracil
  source 1..63: mol_type = other DNA
tctgtacggtgacaaggcgtnnnactnnntgatatggaaaaggagcacttaaataaggttcag

SEQ ID NO: 893 - DNA, 63 bp, synthetic construct
  misc_feature 1..63: note = Synthetic Primer
  misc_difference 21..23: note = n is a, c, g, t or u
  misc_difference 27..29: note = n is a, c, g, t or u
  modified_base 20: mod_base = OTHER; note = uracil
  modified_base 33..34: mod_base = OTHER; note = uracil
  modified_base 37..39: mod_base = OTHER; note = uracil
  modified_base 41..42: mod_base = OTHER; note = uracil
  modified_base 48: mod_base = OTHER; note = uracil
  modified_base 51: mod_base = OTHER; note = uracil
  modified_base 53..54: mod_base = OTHER; note = uracil
  modified_base 62: mod_base = OTHER; note = uracil
  source 1..63: mol_type = other DNA
tctgtacggtgacaaggcgtnnnactnnntgattcctttcttgaaaataatcttgaacagctc

SEQ ID NO: 894 - DNA, 63 bp, synthetic construct
  misc_feature 1..63: note = Synthetic Primer
  misc_difference 21..23: note = n is a, c, g, t or u
  misc_difference 27..29: note = n is a, c, g, t or u
  modified_base 20: mod_base = OTHER; note = uracil
  modified_base 33: mod_base = OTHER; note = uracil
  modified_base 38..39: mod_base = OTHER; note = uracil
  modified_base 44..45: mod_base = OTHER; note = uracil
  modified_base 48: mod_base = OTHER; note = uracil
  modified_base 58: mod_base = OTHER; note = uracil
  modified_base 61..62: mod_base = OTHER; note = uracil
  source 1..63: mol_type = other DNA
tctgtacggtgacaaggcgtnnnactnnntgatcagcttaaagttgataaagagaagtggtta

SEQ ID NO: 895 - DNA, 63 bp, synthetic construct
  misc_feature 1..63: note = Synthetic Primer
  misc_difference 21..23: note = n is a, c, g, t or u
  misc_difference 27..29: note = n is a, c, g, t or u
  modified_base 20: mod_base = OTHER; note = uracil
  modified_base 33: mod_base = OTHER; note = uracil
  modified_base 44..45: mod_base = OTHER; note = uracil
  modified_base 53..54: mod_base = OTHER; note = uracil
  modified_base 56: mod_base = OTHER; note = uracil
  source 1..63: mol_type = other DNA
tctgtacggtgacaaggcgtnnnactnnntgatgaccggcaaattaaagcaattatgaaagaa

SEQ ID NO: 896 - DNA, 63 bp, synthetic construct
  misc_feature 1..63: note = Synthetic Primer
  misc_difference 21..23: note = n is a, c, g, t or u
  misc_difference 27..29: note = n is a, c, g, t or u
  modified_base 20: mod_base = OTHER; note = uracil
  modified_base 33: mod_base = OTHER; note = uracil
  modified_base 38: mod_base = OTHER; note = uracil
  modified_base 42: mod_base = OTHER; note = uracil
  modified_base 46: mod_base = OTHER; note = uracil
  modified_base 49..50: mod_base = OTHER; note = uracil
  modified_base 54: mod_base = OTHER; note = uracil
  modified_base 56: mod_base = OTHER; note = uracil
  modified_base 59: mod_base = OTHER; note = uracil
  modified_base 61..62: mod_base = OTHER; note = uracil
  source 1..63: mol_type = other DNA
tctgtacggtgacaaggcgtnnnactnnntgatcagctacatcaatccttgagtatcctattg

SEQ ID NO: 897 - DNA, 63 bp, synthetic construct
  misc_feature 1..63: note = Synthetic Primer
  misc_difference 21..23: note = n is a, c, g, t or u
  misc_difference 27..29: note = n is a, c, g, t or u
  modified_base 20: mod_base = OTHER; note = uracil
  modified_base 33: mod_base = OTHER; note = uracil
  modified_base 38: mod_base = OTHER; note = uracil
  modified_base 43..46: mod_base = OTHER; note = uracil
  modified_base 48..49: mod_base = OTHER; note = uracil
  modified_base 52: mod_base = OTHER; note = uracil
  modified_base 56..57: mod_base = OTHER; note = uracil
  modified_base 60: mod_base = OTHER; note = uracil
  source 1..63: mol_type = other DNA
tctgtacggtgacaaggcgtnnnactnnntgatggactgcacttttattcatcaattcataga

SEQ ID NO: 898 - DNA, 63 bp, synthetic construct
  misc_feature 1..63: note = Synthetic Primer
  misc_difference 21..23: note = n is a, c, g, t or u
  misc_difference 27..29: note = n is a, c, g, t or u
  modified_base 20: mod_base = OTHER; note = uracil
  modified_base 33: mod_base = OTHER; note = uracil
  modified_base 41: mod_base = OTHER; note = uracil
  modified_base 46: mod_base = OTHER; note = uracil
  modified_base 49..51: mod_base = OTHER; note = uracil
  modified_base 58: mod_base = OTHER; note = uracil
  source 1..63: mol_type = other DNA
tctgtacggtgacaaggcgtnnnactnnntgatcacaagataaagtgatttcaggaatagcaa

SEQ ID NO: 899 - DNA, 63 bp, synthetic construct
  misc_feature 1..63: note = Synthetic Primer
  misc_difference 21..23: note = n is a, c, g, t or u
  misc_difference 27..29: note = n is a, c, g, t or u
  modified_base 20: mod_base = OTHER; note = uracil
  modified_base 33: mod_base = OTHER; note = uracil
  modified_base 45: mod_base = OTHER; note = uracil
  modified_base 47: mod_base = OTHER; note = uracil
  modified_base 57..59: mod_base = OTHER; note = uracil
  modified_base 62: mod_base = OTHER; note = uracil
  source 1..63: mol_type = other DNA
tctgtacggtgacaaggcgtnnnactnnntgatgaaaaggaaaatctgcaaagaactttcctg

SEQ ID NO: 900 - DNA, 63 bp, synthetic construct
  misc_feature 1..63: note = Synthetic Primer
  misc_difference 21..23: note = n is a, c, g, t or u
  misc_difference 27..29: note = n is a, c, g, t or u
  modified_base 20: mod_base = OTHER; note = uracil
  modified_base 33: mod_base = OTHER; note = uracil
  modified_base 42..43: mod_base = OTHER; note = uracil
  modified_base 50: mod_base = OTHER; note = uracil
  modified_base 56: mod_base = OTHER; note = uracil
  modified_base 61..62: mod_base = OTHER; note = uracil
  source 1..63: mol_type = other DNA
tctgtacggtgacaaggcgtnnnactnnntgatagaaggaattagagaatgcaaatgaccttc

SEQ ID NO: 901 - DNA, 63 bp, synthetic construct
  misc_feature 1..63: note = Synthetic Primer
  misc_difference 21..23: note = n is a, c, g, t or u
  misc_difference 27..29: note = n is a, c, g, t or u
  modified_base 20: mod_base = OTHER; note = uracil
  modified_base 33: mod_base = OTHER; note = uracil
  modified_base 39: mod_base = OTHER; note = uracil
  modified_base 44: mod_base = OTHER; note = uracil
  modified_base 49: mod_base = OTHER; note = uracil
  modified_base 51: mod_base = OTHER; note = uracil
  modified_base 60: mod_base = OTHER; note = uracil
  source 1..63: mol_type = other DNA
tctgtacggtgacaaggcgtnnnactnnntgataaaaatgcagtcagatatggagaaaatcca

SEQ ID NO: 902 - DNA, 63 bp, synthetic construct
  misc_feature 1..63: note = Synthetic Primer
  misc_difference 21..23: note = n is a, c, g, t or u
  misc_difference 27..29: note = n is a, c, g, t or u
  modified_base 20: mod_base = OTHER; note = uracil
  modified_base 33..34: mod_base = OTHER; note = uracil
  modified_base 36: mod_base = OTHER; note = uracil
  modified_base 39: mod_base = OTHER; note = uracil
  modified_base 46..47: mod_base = OTHER; note = uracil
  modified_base 49..50: mod_base = OTHER; note = uracil
  modified_base 53..54: mod_base = OTHER; note = uracil
  modified_base 59: mod_base = OTHER; note = uracil
  source 1..63: mol_type = other DNA
tctgtacggtgacaaggcgtnnnactnnntgattctactacgaaattcttaattcccctgacc

SEQ ID NO: 903 - DNA, 63 bp, synthetic construct
  misc_feature 1..63: note = Synthetic Primer
  misc_difference 21..23: note = n is a, c, g, t or u
  misc_difference 27..29: note = n is a, c, g, t or u
  modified_base 20: mod_base = OTHER; note = uracil
  modified_base 33: mod_base = OTHER; note = uracil
  modified_base 36..37: mod_base = OTHER; note = uracil
  modified_base 40: mod_base = OTHER; note = uracil
  modified_base 43: mod_base = OTHER; note = uracil
  modified_base 45: mod_base = OTHER; note = uracil
  modified_base 47: mod_base = OTHER; note = uracil
  modified_base 49..50: mod_base = OTHER; note = uracil
  modified_base 55: mod_base = OTHER; note = uracil
  modified_base 57..58: mod_base = OTHER; note = uracil
  modified_base 61: mod_base = OTHER; note = uracil
  source 1..63: mol_type = other DNA
tctgtacggtgacaaggcgtnnnactnnntgatggttcctaatatgtattgggatgttggtaa

SEQ ID NO: 904 - DNA, 63 bp, synthetic construct
  misc_feature 1..63: note = Synthetic Primer
  misc_difference 21..23: note = n is a, c, g, t or u
  misc_difference 27..29: note = n is a, c, g, t or u
  modified_base 20: mod_base = OTHER; note = uracil
  modified_base 33: mod_base = OTHER; note = uracil
  modified_base 35..36: mod_base = OTHER; note = uracil
  modified_base 38: mod_base = OTHER; note = uracil
  modified_base 40..41: mod_base = OTHER; note = uracil
  modified_base 44: mod_base = OTHER; note = uracil
  modified_base 47: mod_base = OTHER; note = uracil
  modified_base 50: mod_base = OTHER; note = uracil
  modified_base 58: mod_base = OTHER; note = uracil
  modified_base 60: mod_base = OTHER; note = uracil
  source 1..63: mol_type = other DNA
tctgtacggtgacaaggcgtnnnactnnntgatgttctcttcgtcatgatcaacaaatatggt

SEQ ID NO: 905 - DNA, 64 bp, synthetic construct
  misc_feature 1..64: note = Synthetic Primer
  misc_difference 21..23: note = n is a, c, g, t or u
  misc_difference 27..29: note = n is a, c, g, t or u
  modified_base 20: mod_base = OTHER; note = uracil
  modified_base 33: mod_base = OTHER; note = uracil
  modified_base 41: mod_base = OTHER; note = uracil
  modified_base 44..46: mod_base = OTHER; note = uracil
  modified_base 51: mod_base = OTHER; note = uracil
  modified_base 55: mod_base = OTHER; note = uracil
  modified_base 57: mod_base = OTHER; note = uracil
  modified_base 59: mod_base = OTHER; note = uracil
  source 1..64: mol_type = other DNA
tctgtacggtgacaaggcgtnnnactnnntgatacagaaatggtttcaaatgaatctgtagact

SEQ ID NO: 906 - DNA, 64 bp, synthetic construct
  misc_feature 1..64: note = Synthetic Primer
  misc_difference 21..23: note = n is a, c, g, t or u
  misc_difference 27..29: note = n is a, c, g, t or u
  modified_base 20: mod_base = OTHER; note = uracil
  modified_base 33: mod_base = OTHER; note = uracil
  modified_base 38: mod_base = OTHER; note = uracil
  modified_base 40..41: mod_base = OTHER; note = uracil
  modified_base 44: mod_base = OTHER; note = uracil
  modified_base 47: mod_base = OTHER; note = uracil
  modified_base 49: mod_base = OTHER; note = uracil
  modified_base 51: mod_base = OTHER; note = uracil
  modified_base 53: mod_base = OTHER; note = uracil
  modified_base 55: mod_base = OTHER; note = uracil
  modified_base 58: mod_base = OTHER; note = uracil
  modified_base 63: mod_base = OTHER; note = uracil
  source 1..64: mol_type = other DNA
tctgtacggtgacaaggcgtnnnactnnntgataacatgttcatgctgtgtatgtaatagaatg

SEQ ID NO: 907 - DNA, 64 bp, synthetic construct
  misc_feature 1..64: note = Synthetic Primer
  misc_difference 21..23: note = n is a, c, g, t or u
  misc_difference 27..29: note = n is a, c, g, t or u
  modified_base 20: mod_base = OTHER; note = uracil
  modified_base 33: mod_base = OTHER; note = uracil
  modified_base 40..42: mod_base = OTHER; note = uracil
  modified_base 46: mod_base = OTHER; note = uracil
  modified_base 51: mod_base = OTHER; note = uracil
  modified_base 55: mod_base = OTHER; note = uracil
  modified_base 60: mod_base = OTHER; note = uracil
  source 1..64: mol_type = other DNA
tctgtacggtgacaaggcgtnnnactnnntgatgaaagctttaaatgcactaaataacctgagt

SEQ ID NO: 908 - DNA, 64 bp, synthetic construct
  misc_feature 1..64: note = Synthetic Primer
  misc_difference 21..23: note = n is a, c, g, t or u
  misc_difference 27..29: note = n is a, c, g, t or u
  modified_base 20: mod_base = OTHER; note = uracil
  modified_base 33: mod_base = OTHER; note = uracil
  modified_base 37: mod_base = OTHER; note = uracil
  modified_base 39: mod_base = OTHER; note = uracil
  modified_base 42: mod_base = OTHER; note = uracil
  modified_base 47: mod_base = OTHER; note = uracil
  modified_base 50: mod_base = OTHER; note = uracil
  modified_base 61: mod_base = OTHER; note = uracil
  modified_base 63: mod_base = OTHER; note = uracil
  source 1..64: mol_type = other DNA
tctgtacggtgacaaggcgtnnnactnnntgatgaatatgatcaactcctgaaagaacactctg

SEQ ID NO: 909 - DNA, 64 bp, synthetic construct
  misc_feature 1..64: note = Synthetic Primer
  misc_difference 21..23: note = n is a, c, g, t or u
  misc_difference 27..29: note = n is a, c, g, t or u
  modified_base 20: mod_base = OTHER; note = uracil
  modified_base 33: mod_base = OTHER; note = uracil
  modified_base 37..39: mod_base = OTHER; note = uracil
  modified_base 42: mod_base = OTHER; note = uracil
  modified_base 47: mod_base = OTHER; note = uracil
  modified_base 53..54: mod_base = OTHER; note = uracil
  modified_base 60..61: mod_base = OTHER; note = uracil
  modified_base 63: mod_base = OTHER; note = uracil
  source 1..64: mol_type = other DNA
tctgtacggtgacaaggcgtnnnactnnntgatcagtttactccagtaaaaattgaaggttatg

SEQ ID NO: 910 - DNA, 64 bp, synthetic construct
  misc_feature 1..64: note = Synthetic Primer
  misc_difference 21..23: note = n is a, c, g, t or u
  misc_difference 27..29: note = n is a, c, g, t or u
  modified_base 20: mod_base = OTHER; note = uracil
  modified_base 33: mod_base = OTHER; note = uracil
  modified_base 36: mod_base = OTHER; note = uracil
  modified_base 38..40: mod_base = OTHER; note = uracil
  modified_base 45..46: mod_base = OTHER; note = uracil
  modified_base 48..49: mod_base = OTHER; note = uracil
  modified_base 55: mod_base = OTHER; note = uracil
  modified_base 58..59: mod_base = OTHER; note = uracil
  modified_base 62: mod_base = OTHER; note = uracil
  source 1..64: mol_type = other DNA
tctgtacggtgacaaggcgtnnnactnnntgataatatttgcgattattgaagctgcttaatgt

SEQ ID NO: 911 - DNA, 64 bp, synthetic construct
  misc_feature 1..64: note = Synthetic Primer
  misc_difference 21..23: note = n is a, c, g, t or u
  misc_difference 27..29: note = n is a, c, g, t or u
  modified_base 20: mod_base = OTHER; note = uracil
  modified_base 33: mod_base = OTHER; note = uracil
  modified_base 40..41: mod_base = OTHER; note = uracil
  modified_base 44: mod_base = OTHER; note = uracil
  modified_base 46: mod_base = OTHER; note = uracil
  source 1..64: mol_type = other DNA
tctgtacggtgacaaggcgtnnnactnnntgatacacagttaatatgccagaaaaagaaagaaa

SEQ ID NO: 912 - DNA, 64 bp, synthetic construct
  misc_feature 1..64: note = Synthetic Primer
  misc_difference 21..23: note = n is a, c, g, t or u
  misc_difference 27..29: note = n is a, c, g, t or u
  modified_base 20: mod_base = OTHER; note = uracil
  modified_base 33: mod_base = OTHER; note = uracil
  modified_base 36: mod_base = OTHER; note = uracil
  modified_base 38: mod_base = OTHER; note = uracil
  modified_base 40: mod_base = OTHER; note = uracil
  modified_base 43: mod_base = OTHER; note = uracil
  modified_base 47: mod_base = OTHER; note = uracil
  modified_base 50: mod_base = OTHER; note = uracil
  modified_base 54..55: mod_base = OTHER; note = uracil
  modified_base 57..58: mod_base = OTHER; note = uracil
  source 1..64: mol_type = other DNA
tctgtacggtgacaaggcgtnnnactnnntgatgatctgtgctcaataatcagttgttagaaat

SEQ ID NO: 913 - DNA, 64 bp, synthetic construct
  misc_feature 1..64: note = Synthetic Primer
  misc_difference 21..23: note = n is a, c, g, t or u
  misc_difference 27..29: note = n is a, c, g, t or u
  modified_base 20: mod_base = OTHER; note = uracil
  modified_base 33..34: mod_base = OTHER; note = uracil
  modified_base 38..40: mod_base = OTHER; note = uracil
  modified_base 42..44: mod_base = OTHER; note = uracil
  modified_base 46: mod_base = OTHER; note = uracil
  modified_base 49..50: mod_base = OTHER; note = uracil
  modified_base 52: mod_base = OTHER; note = uracil
  modified_base 55: mod_base = OTHER; note = uracil
  modified_base 57..59: mod_base = OTHER; note = uracil
  source 1..64: mol_type = other DNA
tctgtacggtgacaaggcgtnnnactnnntgattggatttgtttctcattctcatatttcacca

SEQ ID NO: 914 - DNA, 64 bp, synthetic construct
  misc_feature 1..64: note = Synthetic Primer
  misc_difference 21..23: note = n is a, c, g, t or u
  misc_difference 27..29: note = n is a, c, g, t or u
  modified_base 20: mod_base = OTHER; note = uracil
  modified_base 33: mod_base = OTHER; note = uracil
  modified_base 38: mod_base = OTHER; note = uracil
  modified_base 41..42: mod_base = OTHER; note = uracil
  modified_base 44: mod_base = OTHER; note = uracil
  modified_base 46: mod_base = OTHER; note = uracil
  modified_base 51: mod_base = OTHER; note = uracil
  modified_base 54: mod_base = OTHER; note = uracil
  modified_base 57: mod_base = OTHER; note = uracil
  modified_base 59: mod_base = OTHER; note = uracil
  modified_base 63: mod_base = OTHER; note = uracil
  source 1..64: mol_type = other DNA
tctgtacggtgacaaggcgtnnnactnnntgataaaataattctgtgggatcatgatctgaatc

SEQ ID NO: 915 - DNA, 64 bp, synthetic construct
  misc_feature 1..64: note = Synthetic Primer
  misc_difference 21..23: note = n is a, c, g, t or u
  misc_difference 27..29: note = n is a, c, g, t or u
  modified_base 20: mod_base = OTHER; note = uracil
  modified_base 33: mod_base = OTHER; note = uracil
  modified_base 35: mod_base = OTHER; note = uracil
  modified_base 41: mod_base = OTHER; note = uracil
  modified_base 43: mod_base = OTHER; note = uracil
  modified_base 46: mod_base = OTHER; note = uracil
  modified_base 49: mod_base = OTHER; note = uracil
  modified_base 54..55: mod_base = OTHER; note = uracil
  source 1..64: mol_type = other DNA
tctgtacggtgacaaggcgtnnnactnnntgatatccgggtataataatgaagttaaaagagca

SEQ ID NO: 916 - DNA, 64 bp, synthetic construct
  misc_feature 1..64: note = Synthetic Primer
  misc_difference 21..23: note = n is a, c, g, t or u
  misc_difference 27..29: note = n is a, c, g, t or u
  modified_base 20: mod_base = OTHER; note = uracil
  modified_base 33: mod_base = OTHER; note = uracil
  modified_base 36: mod_base = OTHER; note = uracil
  modified_base 39: mod_base = OTHER; note = uracil
  modified_base 41..42: mod_base = OTHER; note = uracil
  modified_base 44: mod_base = OTHER; note = uracil
  modified_base 47..48: mod_base = OTHER; note = uracil
  modified_base 51..52: mod_base = OTHER; note = uracil
  modified_base 60: mod_base = OTHER; note = uracil
  source 1..64: mol_type = other DNA
tctgtacggtgacaaggcgtnnnactnnntgatgctcatattctacttcattcagaagatcagg

SEQ ID NO: 917 - DNA, 64 bp, synthetic construct
  misc_feature 1..64: note = Synthetic Primer
  misc_difference 21..23: note = n is a, c, g, t or u
  misc_difference 27..29: note = n is a, c, g, t or u
  modified_base 20: mod_base = OTHER; note = uracil
  modified_base 33: mod_base = OTHER; note = uracil
  modified_base 39..41: mod_base = OTHER; note = uracil
  modified_base 44..45: mod_base = OTHER; note = uracil
  modified_base 50..52: mod_base = OTHER; note = uracil
  modified_base 54: mod_base = OTHER; note = uracil
  modified_base 61..63: mod_base = OTHER; note = uracil
  source 1..64: mol_type = other DNA
tctgtacggtgacaaggcgtnnnactnnntgatcccgatttaattcacatttataaaggctttg

SEQ ID NO: 918 - DNA, 64 bp, synthetic construct
  misc_feature 1..64: note = Synthetic Primer
  misc_difference 21..23: note = n is a, c, g, t or u
  misc_difference 27..29: note = n is a, c, g, t or u
  modified_base 20: mod_base = OTHER; note = uracil
  modified_base 33: mod_base = OTHER; note = uracil
  modified_base 35: mod_base = OTHER; note = uracil
  modified_base 39: mod_base = OTHER; note = uracil
  modified_base 43..44: mod_base = OTHER; note = uracil
  modified_base 56..57: mod_base = OTHER; note = uracil
  modified_base 60: mod_base = OTHER; note = uracil
  source 1..64: mol_type = other DNA
tctgtacggtgacaaggcgtnnnactnnntgatgtaactaaattggagaaaagcattgatgact

SEQ ID NO: 919 - DNA, 65 bp, synthetic construct
  misc_feature 1..65: note = Synthetic Primer
  misc_difference 21..23: note = n is a, c, g, t or u
  misc_difference 27..29: note = n is a, c, g, t or u
  modified_base 20: mod_base = OTHER; note = uracil
  modified_base 33: mod_base = OTHER; note = uracil
  modified_base 35..38: mod_base = OTHER; note = uracil
  modified_base 43..45: mod_base = OTHER; note = uracil
  modified_base 47: mod_base = OTHER; note = uracil
  modified_base 53: mod_base = OTHER; note = uracil
  modified_base 56: mod_base = OTHER; note = uracil
  modified_base 58: mod_base = OTHER; note = uracil
  modified_base 60: mod_base = OTHER; note = uracil
  source 1..65: mol_type = other DNA
tctgtacggtgacaaggcgtnnnactnnntgatgttttcgaatttctcgaactaatgtatagaag

SEQ ID NO: 920 - DNA, 65 bp, synthetic construct
  misc_feature 1..65: note = Synthetic Primer
  misc_difference 21..23: note = n is a, c, g, t or u
  misc_difference 27..29: note = n is a, c, g, t or u
  modified_base 20: mod_base = OTHER; note = uracil
  modified_base 33: mod_base = OTHER; note = uracil
  modified_base 44: mod_base = OTHER; note = uracil
  modified_base 52: mod_base = OTHER; note = uracil
  modified_base 60..63: mod_base = OTHER; note = uracil
  source 1..65: mol_type = other DNA
tctgtacggtgacaaggcgtnnnactnnntgataaaaacaaagtggacaactagaaagattttga

SEQ ID NO: 921 - DNA, 65 bp, synthetic construct
  misc_feature 1..65: note = Synthetic Primer
  misc_difference 21..23: note = n is a, c, g, t or u
  misc_difference 27..29: note = n is a, c, g, t or u
  modified_base 20: mod_base = OTHER; note = uracil
  modified_base 33..34: mod_base = OTHER; note = uracil
  modified_base 36..37: mod_base = OTHER; note = uracil
  modified_base 40: mod_base = OTHER; note = uracil
  modified_base 44: mod_base = OTHER; note = uracil
  modified_base 53: mod_base = OTHER; note = uracil
  modified_base 57..59: mod_base = OTHER; note = uracil
  modified_base 61: mod_base = OTHER; note = uracil
  modified_base 63: mod_base = OTHER; note = uracil
  source 1..65: mol_type = other DNA
tctgtacggtgacaaggcgtnnnactnnntgattcttcctaagtgcaaaagataactttatatca

SEQ ID NO: 922 - DNA, 65 bp, synthetic construct
  misc_feature 1..65: note = Synthetic Primer
  misc_difference 21..23: note = n is a, c, g, t or u
  misc_difference 27..29: note = n is a, c, g, t or u
  modified_base 20: mod_base = OTHER; note = uracil
  modified_base 33: mod_base = OTHER; note = uracil
  modified_base 38: mod_base = OTHER; note = uracil
  modified_base 44..45: mod_base = OTHER; note = uracil
  modified_base 47: mod_base = OTHER; note = uracil
  modified_base 50..53: mod_base = OTHER; note = uracil
  source 1..65: mol_type = other DNA
tctgtacggtgacaaggcgtnnnactnnntgatgacataacagttatgattttgcagaaaacaga

SEQ ID NO: 923 - DNA, 65 bp, synthetic construct
  misc_feature 1..65: note = Synthetic Primer
  misc_difference 21..23: note = n is a, c, g, t or u
  misc_difference 27..29: note = n is a, c, g, t or u
  modified_base 20: mod_base = OTHER; note = uracil
  modified_base 33: mod_base = OTHER; note = uracil
  modified_base 36..38: mod_base = OTHER; note = uracil
  modified_base 45..47: mod_base = OTHER; note = uracil
  modified_base 49..50: mod_base = OTHER; note = uracil
  modified_base 55: mod_base = OTHER; note = uracil
  source 1..65: mol_type = other DNA
tctgtacggtgacaaggcgtnnnactnnntgatcctttcagaaatttcttcaaataaacagaacc

SEQ ID NO: 924 - DNA, 65 bp, synthetic construct
  misc_feature 1..65: note = Synthetic Primer
  misc_difference 21..23: note = n is a, c, g, t or u
  misc_difference 27..29: note = n is a, c, g, t or u
  modified_base 20: mod_base = OTHER; note = uracil
  modified_base 33: mod_base = OTHER; note = uracil
  modified_base 41: mod_base = OTHER; note = uracil
  modified_base 50: mod_base = OTHER; note = uracil
  modified_base 58: mod_base = OTHER; note = uracil
  modified_base 62: mod_base = OTHER; note = uracil
  source 1..65: mol_type = other DNA
tctgtacggtgacaaggcgtnnnactnnntgatagaagaatgacaaagataagaagatagctgag

SEQ ID NO: 925 - DNA, 65 bp, synthetic construct
  misc_feature 1..65: note = Synthetic Primer
  misc_difference 21..23: note = n is a, c, g, t or u
  misc_difference 27..29: note = n is a, c, g, t or u
  modified_base 20: mod_base = OTHER; note = uracil
  modified_base 33: mod_base = OTHER; note = uracil
  modified_base 36: mod_base = OTHER; note = uracil
  modified_base 38: mod_base = OTHER; note = uracil
  modified_base 42..45: mod_base = OTHER; note = uracil
  modified_base 48: mod_base = OTHER; note = uracil
  modified_base 50: mod_base = OTHER; note = uracil
  modified_base 55..57: mod_base = OTHER; note = uracil
  modified_base 64: mod_base = OTHER; note = uracil
  source 1..65: mol_type = other DNA
tctgtacggtgacaaggcgtnnnactnnntgatgatgtagattttaatctgaactttgaaccatc

SEQ ID NO: 926 - DNA, 65 bp, synthetic construct
  misc_feature 1..65: note = Synthetic Primer
  misc_difference 21..23: note = n is a, c, g, t or u
  misc_difference 27..29: note = n is a, c, g, t or u
  modified_base 20: mod_base = OTHER; note = uracil
  modified_base 33: mod_base = OTHER; note = uracil
  modified_base 43: mod_base = OTHER; note = uracil
  modified_base 45..47: mod_base = OTHER; note = uracil
  modified_base 50: mod_base = OTHER; note = uracil
  modified_base 52: mod_base = OTHER; note = uracil
  modified_base 57..58: mod_base = OTHER; note = uracil
  modified_base 61: mod_base = OTHER; note = uracil
  source 1..65: mol_type = other DNA
tctgtacggtgacaaggcgtnnnactnnntgataggaggaactctttactatgaagttaatagaa

SEQ ID NO: 927 - DNA, 65 bp, synthetic construct
  misc_feature 1..65: note = Synthetic Primer
  misc_difference 21..23: note = n is a, c, g, t or u
  misc_difference 27..29: note = n is a, c, g, t or u
  modified_base 20: mod_base = OTHER; note = uracil
  modified_base 33: mod_base = OTHER; note = uracil
  modified_base 44: mod_base = OTHER; note = uracil
  modified_base 52..53: mod_base = OTHER; note = uracil
  modified_base 56: mod_base = OTHER; note = uracil
  modified_base 59: mod_base = OTHER; note = uracil
  modified_base 63: mod_base = OTHER; note = uracil
  source 1..65: mol_type = other DNA
tctgtacggtgacaaggcgtnnnactnnntgatggagaagacatcaaccaattaatcataaatac

SEQ ID NO: 928 - DNA, 65 bp, synthetic construct
  misc_feature 1..65: note = Synthetic Primer
  misc_difference 21..23: note = n is a, c, g, t or u
  misc_difference 27..29: note = n is a, c, g, t or u
  modified_base 20: mod_base = OTHER; note = uracil
  modified_base 33: mod_base = OTHER; note = uracil
  modified_base 35..36: mod_base = OTHER; note = uracil
  modified_base 38..41: mod_base = OTHER; note = uracil
  modified_base 44: mod_base = OTHER; note = uracil
  modified_base 47..49: mod_base = OTHER; note = uracil
  modified_base 55..56: mod_base = OTHER; note = uracil
  modified_base 60: mod_base = OTHER; note = uracil
  modified_base 62: mod_base = OTHER; note = uracil
  source 1..65: mol_type = other DNA
tctgtacggtgacaaggcgtnnnactnnntgatattattttcatgctttggagattggatatagg

SEQ ID NO: 929 - DNA, 65 bp, synthetic construct
  misc_feature 1..65: note = Synthetic Primer
  misc_difference 21..23: note = n is a, c, g, t or u
  misc_difference 27..29: note = n is a, c, g, t or u
  modified_base 20: mod_base = OTHER; note = uracil
  modified_base 33: mod_base = OTHER; note = uracil
  modified_base 37: mod_base = OTHER; note = uracil
  modified_base 40..41: mod_base = OTHER; note = uracil
  modified_base 43: mod_base = OTHER; note = uracil
  modified_base 47: mod_base = OTHER; note = uracil
  modified_base 50: mod_base = OTHER; note = uracil
  modified_base 54: mod_base = OTHER; note = uracil
  modified_base 62: mod_base = OTHER; note = uracil
  source 1..65: mol_type = other DNA
tctgtacggtgacaaggcgtnnnactnnntgatgaatccttatcaatcatcaatgaaaaagtacc

SEQ ID NO: 930 - DNA, 65 bp, synthetic construct
  misc_feature 1..65: note = Synthetic Primer
  misc_difference 21..23: note = n is a, c, g, t or u
  misc_difference 27..29: note = n is a, c, g, t or u
  modified_base 20: mod_base = OTHER; note = uracil
  modified_base 33: mod_base = OTHER; note = uracil
  modified_base 36: mod_base = OTHER; note = uracil
  modified_base 39..41: mod_base = OTHER; note = uracil
  modified_base 44..45: mod_base = OTHER; note = uracil
  modified_base 54..56: mod_base = OTHER; note = uracil
  modified_base 59: mod_base = OTHER; note = uracil
  modified_base 61: mod_base = OTHER; note = uracil
  modified_base 63: mod_base = OTHER; note = uracil
  source 1..65: mol_type = other DNA
tctgtacggtgacaaggcgtnnnactnnntgatgatgatttacttggagaagatttgctatctgg

SEQ ID NO: 931 - DNA, 65 bp, synthetic construct
  misc_feature 1..65: note = Synthetic Primer
  misc_difference 21..23: note = n is a, c, g, t or u
  misc_difference 27..29: note = n is a, c, g, t or u
  modified_base 20: mod_base = OTHER; note = uracil
  modified_base 33: mod_base = OTHER; note = uracil
  modified_base 45: mod_base = OTHER; note = uracil
  modified_base 48: mod_base = OTHER; note = uracil
  modified_base 52..53: mod_base = OTHER; note = uracil
  modified_base 60: mod_base = OTHER; note = uracil
  source 1..65: mol_type = other DNA
tctgtacggtgacaaggcgtnnnactnnntgatcaggaagaaaatcatcaattacgaagtgaaaa

SEQ ID NO: 932 - DNA, 65 bp, synthetic construct
  misc_feature 1..65: note = Synthetic Primer
  misc_difference 21..23: note = n is a, c, g, t or u
  misc_difference 27..29: note = n is a, c, g, t or u
  modified_base 20: mod_base = OTHER; note = uracil
  modified_base 33: mod_base = OTHER; note = uracil
  modified_base 43: mod_base = OTHER; note = uracil
  modified_base 49..50: mod_base = OTHER; note = uracil
  modified_base 52..53: mod_base = OTHER; note = uracil
  modified_base 56: mod_base = OTHER; note = uracil
  modified_base 59: mod_base = OTHER; note = uracil
  modified_base 64: mod_base = OTHER; note = uracil
  source 1..65: mol_type = other DNA
tctgtacggtgacaaggcgtnnnactnnntgataggaagaaatcaagattcttactgataaactc

SEQ ID NO: 933 - DNA, 65 bp, synthetic construct
  misc_feature 1..65: note = Synthetic Primer
  misc_difference 21..23: note = n is a, c, g, t or u
  misc_difference 27..29: note = n is a, c, g, t or u
  modified_base 20: mod_base = OTHER; note = uracil
  modified_base 33..34: mod_base = OTHER; note = uracil
  modified_base 43: mod_base = OTHER; note = uracil
  modified_base 51: mod_base = OTHER; note = uracil
  modified_base 53: mod_base = OTHER; note = uracil
  modified_base 55: mod_base = OTHER; note = uracil
  modified_base 63..64: mod_base = OTHER; note = uracil
  source 1..65: mol_type = other DNA
tctgtacggtgacaaggcgtnnnactnnntgattagaaccaatgagagactatctcaagaacttg

SEQ ID NO: 934 - DNA, 65 bp, synthetic construct
  misc_feature 1..65: note = Synthetic Primer
  misc_difference 21..23: note = n is a, c, g, t or u
  misc_difference 27..29: note = n is a, c, g, t or u
  modified_base 20: mod_base = OTHER; note = uracil
  modified_base 33..34: mod_base = OTHER; note = uracil
  modified_base 36: mod_base = OTHER; note = uracil
  modified_base 39: mod_base = OTHER; note = uracil
  modified_base 48: mod_base = OTHER; note = uracil
  modified_base 52..54: mod_base = OTHER; note = uracil
  modified_base 56..57: mod_base = OTHER; note = uracil
  modified_base 60: mod_base = OTHER; note = uracil
  modified_base 64: mod_base = OTHER; note = uracil
  source 1..65: mol_type = other DNA
tctgtacggtgacaaggcgtnnnactnnntgattatgatgagacagatccatttattgataactc

SEQ ID NO: 935 - DNA, 65 bp, synthetic construct
  misc_feature 1..65: note = Synthetic Primer
  misc_difference 21..23: note = n is a, c, g, t or u
  misc_difference 27..29: note = n is a, c, g, t or u
  modified_base 20: mod_base = OTHER; note = uracil
  modified_base 33: mod_base = OTHER; note = uracil
  modified_base 40..41: mod_base = OTHER; note = uracil
  modified_base 51..52: mod_base = OTHER; note = uracil
  modified_base 58..59: mod_base = OTHER; note = uracil
  modified_base 61: mod_base = OTHER; note = uracil
  source 1..65: mol_type = other DNA
tctgtacggtgacaaggcgtnnnactnnntgataagaacttaaacgaaaattgaacattctgact

SEQ ID NO: 936 - DNA, 65 bp, synthetic construct
  misc_feature 1..65: note = Synthetic Primer
  misc_difference 21..23: note = n is a, c, g, t or u
  misc_difference 27..29: note = n is a, c, g, t or u
  modified_base 20: mod_base = OTHER; note = uracil
  modified_base 33: mod_base = OTHER; note = uracil
  modified_base 41: mod_base = OTHER; note = uracil
  modified_base 44: mod_base = OTHER; note = uracil
  modified_base 46..49: mod_base = OTHER; note = uracil
  modified_base 52: mod_base = OTHER; note = uracil
  modified_base 58..59: mod_base = OTHER; note = uracil
  modified_base 61..62: mod_base = OTHER; note = uracil
  modified_base 64: mod_base = OTHER; note = uracil
  source 1..65: mol_type = other DNA
tctgtacggtgacaaggcgtnnnactnnntgatagcaagctggtattttcatacaaattcttcta

SEQ ID NO: 937 - DNA, 66 bp, synthetic construct
  misc_feature 1..66: note = Synthetic Primer
  misc_difference 21..23: note = n is a, c, g, t or u
  misc_difference 27..29: note = n is a, c, g, t or u
  modified_base 20: mod_base = OTHER; note = uracil
  modified_base 33: mod_base = OTHER; note = uracil
  modified_base 38: mod_base = OTHER; note = uracil
  modified_base 40..42: mod_base = OTHER; note = uracil
  modified_base 44: mod_base = OTHER; note = uracil
  modified_base 52..53: mod_base = OTHER; note = uracil
  modified_base 55..56: mod_base = OTHER; note = uracil
  modified_base 59: mod_base = OTHER; note = uracil
  modified_base 61: mod_base = OTHER; note = uracil
  source 1..66: mol_type = other DNA
tctgtacggtgacaaggcgtnnnactnnntgatcagatatttatccaaacattattgctatgggat

SEQ ID NO: 938 - DNA, 66 bp, synthetic construct
  misc_feature 1..66: note = Synthetic Primer
  misc_difference 21..23: note = n is a, c, g, t or u
  misc_difference 27..29: note = n is a, c, g, t or u
  modified_base 20: mod_base = OTHER; note = uracil
  modified_base 33: mod_base = OTHER; note = uracil
  modified_base 36: mod_base = OTHER; note = uracil
  modified_base 40: mod_base = OTHER; note = uracil
  modified_base 43..45: mod_base = OTHER; note = uracil
  modified_base 50: mod_base = OTHER; note = uracil
  modified_base 54: mod_base = OTHER; note = uracil
  modified_base 57: mod_base = OTHER; note = uracil
  modified_base 59..61: mod_base = OTHER; note = uracil
  modified_base 63: mod_base = OTHER; note = uracil
  source 1..66: mol_type = other DNA
tctgtacggtgacaaggcgtnnnactnnntgatactaaatagtttaagatgagtcatatttgtggg

SEQ ID NO: 939 - DNA, 66 bp, synthetic construct
  misc_feature 1..66: note = Synthetic Primer
  misc_difference 21..23: note = n is a, c, g, t or u
  misc_difference 27..29: note = n is a, c, g, t or u
  modified_base 20: mod_base = OTHER; note = uracil
  modified_base 33..34: mod_base = OTHER; note = uracil
  modified_base 36: mod_base = OTHER; note = uracil
  modified_base 39: mod_base = OTHER; note = uracil
  modified_base 41: mod_base = OTHER; note = uracil
  modified_base 43: mod_base = OTHER; note = uracil
  modified_base 50..52: mod_base = OTHER; note = uracil
  modified_base 55..56: mod_base = OTHER; note = uracil
  modified_base 64: mod_base = OTHER; note = uracil
  source 1..66: mol_type = other DNA
tctgtacggtgacaaggcgtnnnactnnntgattctcatctctaaaggatttaattacaaagatgc

SEQ ID NO: 940 - DNA, 66 bp, synthetic construct
  misc_feature 1..66: note = Synthetic Primer
  misc_difference 21..23: note = n is a, c, g, t or u
  misc_difference 27..29: note = n is a, c, g, t or u
  modified_base 20: mod_base = OTHER; note = uracil
  modified_base 33: mod_base = OTHER; note = uracil
  modified_base 35: mod_base = OTHER; note = uracil
  modified_base 37: mod_base = OTHER; note = uracil
  modified_base 39: mod_base = OTHER; note = uracil
  modified_base 41: mod_base = OTHER; note = uracil
  modified_base 44: mod_base = OTHER; note = uracil
  modified_base 46: mod_base = OTHER; note = uracil
  modified_base 48: mod_base = OTHER; note = uracil
  modified_base 54: mod_base = OTHER; note = uracil
  modified_base 64: mod_base = OTHER; note = uracil
  source 1..66: mol_type = other DNA
tctgtacggtgacaaggcgtnnnactnnntgatctctatgtagtctctgaaaatggaagaaaatat

SEQ ID NO: 941 - DNA, 66 bp, synthetic construct
  misc_feature 1..66: note = Synthetic Primer
  misc_difference 21..23: note = n is a, c, g, t or u
  misc_difference 27..29: note = n is a, c, g, t or u
  modified_base 20: mod_base = OTHER; note = uracil
  modified_base 33: mod_base = OTHER; note = uracil
  modified_base 42: mod_base = OTHER; note = uracil
  modified_base 49..51: mod_base = OTHER; note = uracil
  modified_base 63: mod_base = OTHER; note = uracil
  source 1..66: mol_type = other DNA
tctgtacggtgacaaggcgtnnnactnnntgatcaacaagatagaagatttggagcaagaaataaa

SEQ ID NO: 942 - DNA, 66 bp, synthetic construct
  misc_feature 1..66: note = Synthetic Primer
  misc_difference 21..23: note = n is a, c, g, t or u
  misc_difference 27..29: note = n is a, c, g, t or u
  modified_base 20: mod_base = OTHER; note = uracil
  modified_base 33: mod_base = OTHER; note = uracil
  modified_base 36: mod_base = OTHER; note = uracil
  modified_base 42..43: mod_base = OTHER; note = uracil
  modified_base 46: mod_base = OTHER; note = uracil
  modified_base 53: mod_base = OTHER; note = uracil
  modified_base 56: mod_base = OTHER; note = uracil
  modified_base 58: mod_base = OTHER; note = uracil
  modified_base 62: mod_base = OTHER; note = uracil
  source 1..66: mol_type = other DNA
tctgtacggtgacaaggcgtnnnactnnntgatcatgcaacttactgaaaaatactataaatgacc

SEQ ID NO: 943 - DNA, 66 bp, synthetic construct
  misc_feature 1..66: note = Synthetic Primer
  misc_difference 21..23: note = n is a, c, g, t or u
  misc_difference 27..29: note = n is a, c, g, t or u
  modified_base 20: mod_base = OTHER; note = uracil
  modified_base 33: mod_base = OTHER; note = uracil
  modified_base 36..37: mod_base = OTHER; note = uracil
  modified_base 39..40: mod_base = OTHER; note = uracil
  modified_base 48..50: mod_base = OTHER; note = uracil
  modified_base 52: mod_base = OTHER; note = uracil
  modified_base 57: mod_base = OTHER; note = uracil
  modified_base 60..61: mod_base = OTHER; note = uracil
  source 1..66: mol_type = other DNA
tctgtacggtgacaaggcgtnnnactnnntgatccttattaaagaactttctaaagtaattcgagc

SEQ ID NO: 944 - DNA, 66 bp, synthetic construct
  misc_feature 1..66: note = Synthetic Primer
  misc_difference 21..23: note = n is a, c, g, t or u
  misc_difference 27..29: note = n is a, c, g, t or u
  modified_base 20: mod_base = OTHER; note = uracil
  modified_base 33: mod_base = OTHER; note = uracil
  modified_base 35: mod_base = OTHER; note = uracil
  modified_base 42: mod_base = OTHER; note = uracil
  modified_base 45..46: mod_base = OTHER; note = uracil
  modified_base 48..51: mod_base = OTHER; note = uracil
  modified_base 56..58: mod_base = OTHER; note = uracil
  source 1..66: mol_type = other DNA
tctgtacggtgacaaggcgtnnnactnnntgatctcaggactcattattttaacatttgggagaaa

SEQ ID NO: 945 - DNA, 66 bp, synthetic construct
  misc_feature 1..66: note = Synthetic Primer
  misc_difference 21..23: note = n is a, c, g, t or u
  misc_difference 27..29: note = n is a, c, g, t or u
  modified_base 20: mod_base = OTHER; note = uracil
  modified_base 33: mod_base = OTHER; note = uracil
  modified_base 38: mod_base = OTHER; note = uracil
  modified_base 40: mod_base = OTHER; note = uracil
  modified_base 42..44: mod_base = OTHER; note = uracil
  modified_base 48..49: mod_base = OTHER; note = uracil
  modified_base 54: mod_base = OTHER; note = uracil
  modified_base 59: mod_base = OTHER; note = uracil
  source 1..66: mol_type = other DNA
tctgtacggtgacaaggcgtnnnactnnntgatgccctatatttgcattaaaatggaataagaaag

SEQ ID NO: 946 - DNA, 66 bp, synthetic construct
  misc_feature 1..66: note = Synthetic Primer
  misc_difference 21..23: note = n is a, c, g, t or u
  misc_difference 27..29: note = n is a, c, g, t or u
  modified_base 20: mod_base = OTHER; note = uracil
  modified_base 33: mod_base = OTHER; note = uracil
  modified_base 37..38: mod_base = OTHER; note = uracil
  modified_base 42: mod_base = OTHER; note = uracil
  modified_base 50: mod_base = OTHER; note = uracil
  modified_base 56..58: mod_base = OTHER; note = uracil
  modified_base 60: mod_base = OTHER; note = uracil
  modified_base 63..65: mod_base = OTHER; note = uracil
  source 1..66: mol_type = other DNA
tctgtacggtgacaaggcgtnnnactnnntgatgaattaaatgcccacataaaactttctaatttg

SEQ ID NO: 947 - DNA, 66 bp, synthetic construct
  misc_feature 1..66: note = Synthetic Primer
  misc_difference 21..23: note = n is a, c, g, t or u
  misc_difference 27..29: note = n is a, c, g, t or u
  modified_base 20: mod_base = OTHER; note = uracil
  modified_base 33: mod_base = OTHER; note = uracil
  modified_base 36..37: mod_base = OTHER; note = uracil
  modified_base 40: mod_base = OTHER; note = uracil
  modified_base 42: mod_base = OTHER; note = uracil
  modified_base 44..46: mod_base = OTHER; note = uracil
  modified_base 51: mod_base = OTHER; note = uracil
  modified_base 54: mod_base = OTHER; note = uracil
  modified_base 57: mod_base = OTHER; note = uracil
  modified_base 63: mod_base = OTHER; note = uracil
  source 1..66: mol_type = other DNA
tctgtacggtgacaaggcgtnnnactnnntgatagttgctatatttacactgatggtagaaataaa

SEQ ID NO: 948 - DNA, 66 bp, synthetic construct
  misc_feature 1..66: note = Synthetic Primer
  misc_difference 21..23: note = n is a, c, g, t or u
  misc_difference 27..29: note = n is a, c, g, t or u
  modified_base 20: mod_base = OTHER; note = uracil
  modified_base 33: mod_base = OTHER; note = uracil
  modified_base 36: mod_base = OTHER; note = uracil
  modified_base 38: mod_base = OTHER; note = uracil
  modified_base 40..41: mod_base = OTHER; note = uracil
  modified_base 47..48: mod_base = OTHER; note = uracil
  modified_base 50: mod_base = OTHER; note = uracil
  modified_base 52..53: mod_base = OTHER; note = uracil
  modified_base 56: mod_base = OTHER; note = uracil
  modified_base 63: mod_base = OTHER; note = uracil
  source 1..66: mol_type = other DNA
tctgtacggtgacaaggcgtnnnactnnntgatcctatattacagattctattcatgaacaatgct

SEQ ID NO: 949 - DNA, 51 bp, synthetic construct
  misc_feature 1..51: note = Synthetic Primer
  misc_difference 21..23: note = n is a, c, g, t or u
  misc_difference 27..29: note = n is a, c, g, t or u
  modified_base 20: mod_base = OTHER; note = uracil
  modified_base 33: mod_base = OTHER; note = uracil
  modified_base 35: mod_base = OTHER; note = uracil
  modified_base 37: mod_base = OTHER; note = uracil
  modified_base 44: mod_base = OTHER; note = uracil
  modified_base 48: mod_base = OTHER; note = uracil
  source 1..51: mol_type = other DNA
tctgtacggtgacaaggcgtnnnactnnntgatctctccacgctccctcca

SEQ ID NO: 950 - DNA, 62 bp, synthetic construct
  misc_feature 1..62: note = Synthetic Primer
  misc_difference 21..23: note = n is a, c, g, t or u
  misc_difference 27..29: note = n is a, c, g, t or u
  modified_base 20: mod_base = OTHER; note = uracil
  modified_base 33..34: mod_base = OTHER; note = uracil
  modified_base 36..38: mod_base = OTHER; note = uracil
  modified_base 41: mod_base = OTHER; note = uracil
  modified_base 48: mod_base = OTHER; note = uracil
  modified_base 53: mod_base = OTHER; note = uracil
  modified_base 56: mod_base = OTHER; note = uracil
  modified_base 59: mod_base = OTHER; note = uracil
  source 1..62: mol_type = other DNA
tctgtacggtgacaaggcgtnnnactnnntgattgtttactaccaaatggaatgatagtgac

SEQ ID NO: 951 - DNA, 51 bp, synthetic construct
  misc_feature 1..51: note = Synthetic Primer
  misc_difference 21..23: note = n is a, c, g, t or u
  misc_difference 27..29: note = n is a, c, g, t or u
  modified_base 20: mod_base = OTHER; note = uracil
  modified_base 33: mod_base = OTHER; note = uracil
  modified_base 36..37: mod_base = OTHER; note = uracil
  modified_base 39..40: mod_base = OTHER; note = uracil
  modified_base 42: mod_base = OTHER; note = uracil
  modified_base 45: mod_base = OTHER; note = uracil
  modified_base 48: mod_base = OTHER; note = uracil
  source 1..51: mol_type = other DNA
tctgtacggtgacaaggcgtnnnactnnntgatgcttcttctgctgctcgt

SEQ ID NO: 952 - DNA, 57 bp, synthetic construct
  misc_feature 1..57: note = Synthetic Primer
  misc_difference 21..23: note = n is a, c, g, t or u
  misc_difference 27..29: note = n is a, c, g, t or u
  modified_base 20: mod_base = OTHER; note = uracil
  modified_base 33: mod_base = OTHER; note = uracil
  modified_base 36: mod_base = OTHER; note = uracil
  modified_base 39: mod_base = OTHER; note = uracil
  modified_base 41..42: mod_base = OTHER; note = uracil
  modified_base 44..45: mod_base = OTHER; note = uracil
  modified_base 48..49: mod_base = OTHER; note = uracil
  source 1..57: mol_type = other DNA
tctgtacggtgacaaggcgtnnnactnnntgatggtcgtgttcttcattcggcacag

SEQ ID NO: 953 - DNA, 63 bp, synthetic construct
  misc_feature 1..63: note = Synthetic Primer
  misc_difference 21..23: note = n is a, c, g, t or u
  misc_difference 27..29: note = n is a, c, g, t or u
  modified_base 20: mod_base = OTHER; note = uracil
  modified_base 33: mod_base = OTHER; note = uracil
  modified_base 38: mod_base = OTHER; note = uracil
  modified_base 43..44: mod_base = OTHER; note = uracil
  modified_base 46: mod_base = OTHER; note = uracil
  modified_base 48: mod_base = OTHER; note = uracil
  modified_base 50: mod_base = OTHER; note = uracil
  modified_base 55..56: mod_base = OTHER; note = uracil
  modified_base 59: mod_base = OTHER; note = uracil
  source 1..63: mol_type = other DNA
tctgtacggtgacaaggcgtnnnactnnntgataagatcccattgtctatgaaattcatccaa

SEQ ID NO: 954 - DNA, 50 bp, synthetic construct
  misc_feature 1..50: note = Synthetic Primer
  misc_difference 21..23: note = n is a, c, g, t or u
  misc_difference 27..29: note = n is a, c, g, t or u
  modified_base 20: mod_base = OTHER; note = uracil
  modified_base 33: mod_base = OTHER; note = uracil
  modified_base 39: mod_base = OTHER; note = uracil
  modified_base 48: mod_base = OTHER; note = uracil
  source 1..50: mol_type = other DNA
tctgtacggtgacaaggcgtnnnactnnntgatccccctacagcgcatcc

SEQ ID NO: 955 - DNA, 55 bp, synthetic construct
  misc_feature 1..55: note = Synthetic Primer
  misc_difference 21..23: note = n is a, c, g, t or u
  misc_difference 27..29: note = n is a, c, g, t or u
  modified_base 20: mod_base = OTHER; note = uracil
  modified_base 33: mod_base = OTHER; note = uracil
  modified_base 38..39: mod_base = OTHER; note = uracil
  modified_base 43: mod_base = OTHER; note = uracil
  modified_base 53..54: mod_base = OTHER; note = uracil
  source 1..55: mol_type = other DNA
tctgtacggtgacaaggcgtnnnactnnntgatggaattccctcggaagaacttg

SEQ ID NO: 956 - DNA, 53 bp, synthetic construct
  misc_feature 1..53: note = Synthetic Primer
  misc_difference 21..23: note = n is a, c, g, t or u
  misc_difference 27..29: note = n is a, c, g, t or u
  modified_base 20: mod_base = OTHER; note = uracil
  modified_base 33: mod_base = OTHER; note = uracil
  modified_base 36: mod_base = OTHER; note = uracil
  modified_base 38: mod_base = OTHER; note = uracil
  source 1..53: mol_type = other DNA
tctgtacggtgacaaggcgtnnnactnnntgatcatctgaaaggcagagcagg

SEQ ID NO: 957 - DNA, 57 bp, synthetic construct
  misc_feature 1..57: note = Synthetic Primer
  misc_difference 21..23: note = n is a, c, g, t or u
  misc_difference 27..29: note = n is a, c, g, t or u
  modified_base 20: mod_base = OTHER; note = uracil
  modified_base 33..34: mod_base = OTHER; note = uracil
  modified_base 40..41: mod_base = OTHER; note = uracil
  modified_base 46: mod_base = OTHER; note = uracil
  modified_base 48: mod_base = OTHER; note = uracil
  modified_base 50..54: mod_base = OTHER; note = uracil
  source 1..57: mol_type = other DNA
tctgtacggtgacaaggcgtnnnactnnntgattccccattggactgtatttttgcc

SEQ ID NO: 958 - DNA, 51 bp, synthetic construct
  misc_feature 1..51: note = Synthetic Primer
  misc_difference 21..23: note = n is a, c, g, t or u
  misc_difference 27..29: note = n is a, c, g, t or u
  modified_base 20: mod_base = OTHER; note = uracil
  modified_base 33: mod_base = OTHER; note = uracil
  modified_base 39: mod_base = OTHER; note = uracil
  modified_base 41: mod_base = OTHER; note = uracil
  modified_base 44..45: mod_base = OTHER; note = uracil
  modified_base 50: mod_base = OTHER; note = uracil
  source 1..51: mol_type = other DNA
tctgtacggtgacaaggcgtnnnactnnntgatcccgatgtcattcgggtc

SEQ ID NO: 959 - DNA, 56 bp, synthetic construct
  misc_feature 1..56: note = Synthetic Primer
  misc_difference 21..23: note = n is a, c, g, t or u
  misc_difference 27..29: note = n is a, c, g, t or u
  modified_base 20: mod_base = OTHER; note = uracil
  modified_base 33: mod_base = OTHER; note = uracil
  modified_base 37: mod_base = OTHER; note = uracil
  modified_base 42: mod_base = OTHER; note = uracil
  modified_base 45: mod_base = OTHER; note = uracil
  modified_base 52: mod_base = OTHER; note = uracil
  modified_base 54..55: mod_base = OTHER; note = uracil
  source 1..56: mol_type = other DNA
tctgtacggtgacaaggcgtnnnactnnntgatagatgggctagtcaggactcttc

SEQ ID NO: 960 - DNA, 53 bp, synthetic construct
  misc_feature 1..53: note = Synthetic Primer
  misc_difference 21..23: note = n is a, c, g, t or u
  misc_difference 27..29: note = n is a, c, g, t or u
  modified_base 20: mod_base = OTHER; note = uracil
  modified_base 33..34: mod_base = OTHER; note = uracil
  modified_base 40: mod_base = OTHER; note = uracil
  modified_base 42: mod_base = OTHER; note = uracil
  modified_base 44: mod_base = OTHER; note = uracil
  modified_base 46..48: mod_base = OTHER; note = uracil
  source 1..53: mol_type = other DNA
tctgtacggtgacaaggcgtnnnactnnntgattccacgtctctgtttccaca

SEQ ID NO: 961 - DNA, 51 bp, synthetic construct
  misc_feature 1..51: note = Synthetic Primer
  misc_difference 21..23: note = n is a, c, g, t or u
  misc_difference 27..29: note = n is a, c, g, t or u
  modified_base 20: mod_base = OTHER; note = uracil
  modified_base 33..36: mod_base = OTHER; note = uracil
  modified_base 38: mod_base = OTHER; note = uracil
  modified_base 43: mod_base = OTHER; note = uracil
  source 1..51: mol_type = other DNA
tctgtacggtgacaaggcgtnnnactnnntgattttgtcccgtcaaagccc

SEQ ID NO: 962 - DNA, 51 bp, synthetic construct
  misc_feature 1..51: note = Synthetic Primer
  misc_difference 21..23: note = n is a, c, g, t or u
  misc_difference 27..29: note = n is a, c, g, t or u
  modified_base 20: mod_base = OTHER; note = uracil
  modified_base 33: mod_base = OTHER; note = uracil
  modified_base 37: mod_base = OTHER; note = uracil
  modified_base 40: mod_base = OTHER; note = uracil
  modified_base 45: mod_base = OTHER; note = uracil
  modified_base 49: mod_base = OTHER; note = uracil
  source 1..51: mol_type = other DNA
tctgtacggtgacaaggcgtnnnactnnntgatgggtgctcccctccctac

SEQ ID NO: 963 - DNA, 50 bp, synthetic construct
  misc_feature 1..50: note = Synthetic Primer
  misc_difference 21..23: note = n is a, c, g, t or u
  misc_difference 27..29: note = n is a, c, g, t or u
  modified_base 20: mod_base = OTHER; note = uracil
  modified_base 33: mod_base = OTHER; note = uracil
  modified_base 35: mod_base = OTHER; note = uracil
  modified_base 39: mod_base = OTHER; note = uracil
  modified_base 44..45: mod_base = OTHER; note = uracil
  modified_base 47: mod_base = OTHER; note = uracil
  source 1..50: mol_type = other DNA
tctgtacggtgacaaggcgtnnnactnnntgatctgcgtgggcttgtgca

SEQ ID NO: 964 - DNA, 52 bp, synthetic construct
  misc_feature 1..52: note = Synthetic Primer
  misc_difference 21..23: note = n is a, c, g, t or u
  misc_difference 27..29: note = n is a, c, g, t or u
  modified_base 20: mod_base = OTHER; note = uracil
  modified_base 33: mod_base = OTHER; note = uracil
  modified_base 40: mod_base = OTHER; note = uracil
  modified_base 44: mod_base = OTHER; note = uracil
  modified_base 46: mod_base = OTHER; note = uracil
  source 1..52: mol_type = other DNA
tctgtacggtgacaaggcgtnnnactnnntgatacggcatagatgtggccat

SEQ ID NO: 965 - DNA, 50 bp, synthetic construct
  misc_feature 1..50: note = Synthetic Primer
  misc_difference 21..23: note = n is a, c, g, t or u
  misc_difference 27..29: note = n is a, c, g, t or u
  modified_base 20: mod_base = OTHER; note = uracil
  modified_base 33: mod_base = OTHER; note = uracil
  modified_base 39..40: mod_base = OTHER; note = uracil
  modified_base 45: mod_base = OTHER; note = uracil
  modified_base 48: mod_base = OTHER; note = uracil
  source 1..50: mol_type = other DNA
tctgtacggtgacaaggcgtnnnactnnntgatgcacgttcaggtcgtcc

SEQ ID NO: 966 - DNA, 50 bp, synthetic construct
  misc_feature 1..50: note = Synthetic Primer
  misc_difference 21..23: note = n is a, c, g, t or u
  misc_difference 27..29: note = n is a, c, g, t or u
  modified_base 20: mod_base = OTHER; note = uracil
  modified_base 33: mod_base = OTHER; note = uracil
  modified_base 40: mod_base = OTHER; note = uracil
  modified_base 45: mod_base = OTHER; note = uracil
  modified_base 49: mod_base = OTHER; note = uracil
  source 1..50: mol_type = other DNA
tctgtacggtgacaaggcgtnnnactnnntgatgccaggtgccgtcactg

SEQ ID NO: 967 - DNA, 50 bp, synthetic construct
  misc_feature 1..50: note = Synthetic Primer
  misc_difference 21..23: note = n is a, c, g, t or u
  misc_difference 27..29: note = n is a, c, g, t or u
  modified_base 20: mod_base = OTHER; note = uracil
  modified_base 33: mod_base = OTHER; note = uracil
  modified_base 36: mod_base = OTHER; note = uracil
  modified_base 41: mod_base = OTHER; note = uracil
  modified_base 45: mod_base = OTHER; note = uracil
  modified_base 47..48: mod_base = OTHER; note = uracil
  source 1..50: mol_type = other DNA
tctgtacggtgacaaggcgtnnnactnnntgatgctggagtcggtgttgc

SEQ ID NO: 968 - DNA, 56 bp, synthetic construct
  misc_feature 1..56: note = Synthetic Primer
  misc_difference 21..23: note = n is a, c, g, t or u
  misc_difference 27..29: note = n is a, c, g, t or u
  modified_base 20: mod_base = OTHER; note = uracil
  modified_base 33: mod_base = OTHER; note = uracil
  modified_base 35: mod_base = OTHER; note = uracil
  modified_base 43: mod_base = OTHER; note = uracil
  modified_base 45: mod_base = OTHER; note = uracil
  modified_base 49: mod_base = OTHER; note = uracil
  modified_base 51: mod_base = OTHER; note = uracil
  modified_base 53..54: mod_base = OTHER; note = uracil
  source 1..56: mol_type = other DNA
tctgtacggtgacaaggcgtnnnactnnntgatatacccggatctcagtgtcttgg

SEQ ID NO: 969 - DNA, 51 bp, synthetic construct
  misc_feature 1..51: note = Synthetic Primer
  misc_difference 21..23: note = n is a, c, g, t or u
  misc_difference 27..29: note = n is a, c, g, t or u
  modified_base 20: mod_base = OTHER; note = uracil
  modified_base 33: mod_base = OTHER; note = uracil
  modified_base 44: mod_base = OTHER; note = uracil
  modified_base 50: mod_base = OTHER; note = uracil
  source 1..51: mol_type = other DNA
tctgtacggtgacaaggcgtnnnactnnntgatcagcagcgcctggacgta

SEQ ID NO: 970 - DNA, 51 bp, synthetic construct
  misc_feature 1..51: note = Synthetic Primer
  misc_difference 21..23: note = n is a, c, g, t or u
  misc_difference 27..29: note = n is a, c, g, t or u
  modified_base 20: mod_base = OTHER; note = uracil
  modified_base 33: mod_base = OTHER; note = uracil
  modified_base 42: mod_base = OTHER; note = uracil
  modified_base 46: mod_base = OTHER; note = uracil
  source 1..51: mol_type = other DNA
tctgtacggtgacaaggcgtnnnactnnntgatgacagggctggatgaggc

SEQ ID NO: 971 - DNA, 50 bp, synthetic construct
  misc_feature 1..50: note = Synthetic Primer
  misc_difference 21..23: note = n is a, c, g, t or u
  misc_difference 27..29: note = n is a, c, g, t or u
  modified_base 20: mod_base = OTHER; note = uracil
  modified_base 33: mod_base = OTHER; note = uracil
  modified_base 38: mod_base = OTHER; note = uracil
  modified_base 44: mod_base = OTHER; note = uracil
  modified_base 49: mod_base = OTHER; note = uracil
  source 1..50: mol_type = other DNA
tctgtacggtgacaaggcgtnnnactnnntgatgcgatgccgatggcatt

SEQ ID NO: 972 - DNA, 50 bp, synthetic construct
  misc_feature 1..50: note = Synthetic Primer
  misc_difference 21..23: note = n is a, c, g, t or u
  misc_difference 27..29: note = n is a, c, g, t or u
  modified_base 20: mod_base = OTHER; note = uracil
  modified_base 33: mod_base = OTHER; note = uracil
  modified_base 39: mod_base = OTHER; note = uracil
  modified_base 48: mod_base = OTHER; note = uracil
  source 1..50: mol_type = other DNA
tctgtacggtgacaaggcgtnnnactnnntgatggagatggaggccgtgt

SEQ ID NO: 973 - DNA, 50 bp, synthetic construct
  misc_feature 1..50: note = Synthetic Primer
  misc_difference 21..23: note = n is a, c, g, t or u
  misc_difference 27..29: note = n is a, c, g, t or u
  modified_base 20: mod_base = OTHER; note = uracil
  modified_base 33: mod_base = OTHER; note = uracil
  modified_base 38: mod_base = OTHER; note = uracil
  modified_base 42: mod_base = OTHER; note = uracil
  source 1..50: mol_type = other DNA
tctgtacggtgacaaggcgtnnnactnnntgatggcgtacatcaccgcgt

SEQ ID NO: 974 - DNA, 50 bp, synthetic construct
  misc_feature 1..50: note = Synthetic Primer
  misc_difference 21..23: note = n is a, c, g, t or u
  misc_difference 27..29: note = n is a, c, g, t or u
  modified_base 20: mod_base = OTHER; note = uracil
  modified_base 33: mod_base = OTHER; note = uracil
  modified_base 37: mod_base = OTHER; note = uracil
  modified_base 40: mod_base = OTHER; note = uracil
  modified_base 44: mod_base = OTHER; note = uracil
  source 1..50: mol_type = other DNA
tctgtacggtgacaaggcgtnnnactnnntgatagctgctggctgagccg

SEQ ID NO: 975 - DNA, 54 bp, synthetic construct
  misc_feature 1..54: note = Synthetic Primer
  misc_difference 21..23: note = n is a, c, g, t or u
  misc_difference 27..29: note = n is a, c, g, t or u
  modified_base 20: mod_base = OTHER; note = uracil
  modified_base 33: mod_base = OTHER; note = uracil
  modified_base 36: mod_base = OTHER; note = uracil
  modified_base 40: mod_base = OTHER; note = uracil
  modified_base 43: mod_base = OTHER; note = uracil
  modified_base 46..47: mod_base = OTHER; note = uracil
  modified_base 49: mod_base = OTHER; note = uracil
  modified_base 52: mod_base = OTHER; note = uracil
  source 1..54: mol_type = other DNA
tctgtacggtgacaaggcgtnnnactnnntgatcatccctggtccttctcctga

SEQ ID NO: 976 - DNA, 50 bp, synthetic construct
  misc_feature 1..50: note = Synthetic Primer
  misc_difference 21..23: note = n is a, c, g, t or u
  misc_difference 27..29: note = n is a, c, g, t or u
  modified_base 20: mod_base = OTHER; note = uracil
  modified_base 33: mod_base = OTHER; note = uracil
  modified_base 41: mod_base = OTHER; note = uracil
  modified_base 44: mod_base = OTHER; note = uracil
  source 1..50: mol_type = other DNA
tctgtacggtgacaaggcgtnnnactnnntgatgccaagctcatcggcaa

SEQ ID NO: 977 - DNA, 50 bp, synthetic construct
  misc_feature 1..50: note = Synthetic Primer
  misc_difference 21..23: note = n is a, c, g, t or u
  misc_difference 27..29: note = n is a, c, g, t or u
  modified_base 20: mod_base = OTHER; note = uracil
  modified_base 33: mod_base = OTHER; note = uracil
  modified_base 46: mod_base = OTHER; note = uracil
  modified_base 49: mod_base = OTHER; note = uracil
  source 1..50: mol_type = other DNA
tctgtacggtgacaaggcgtnnnactnnntgatcggagggcgagctgatg

SEQ ID NO: 978 - DNA, 50 bp, synthetic construct
  misc_feature 1..50: note = Synthetic Primer
  misc_difference 21..23: note = n is a, c, g, t or u
  misc_difference 27..29: note = n is a, c, g, t or u
  modified_base 20: mod_base = OTHER; note = uracil
  modified_base 33: mod_base = OTHER; note = uracil
  modified_base 36: mod_base = OTHER; note = uracil
  modified_base 48: mod_base = OTHER; note = uracil
  source 1..50: mol_type = other DNA
tctgtacggtgacaaggcgtnnnactnnntgatgctcacccgcggactca

SEQ ID NO: 979 - DNA, 50 bp, synthetic construct
  misc_feature 1..50: note = Synthetic Primer
  misc_difference 21..23: note = n is a, c, g, t or u
  misc_difference 27..29: note = n is a, c, g, t or u
  modified_base 20: mod_base = OTHER; note = uracil
  modified_base 33: mod_base = OTHER; note = uracil
  modified_base 35: mod_base = OTHER; note = uracil
  modified_base 48: mod_base = OTHER; note = uracil
  source 1..50: mol_type = other DNA
tctgtacggtgacaaggcgtnnnactnnntgatgtgcaggagggccgtca

SEQ ID NO: 980 - DNA, 52 bp, synthetic construct
  misc_feature 1..52: note = Synthetic Primer
  misc_difference 21..23: note = n is a, c, g, t or u
  misc_difference 27..29: note = n is a, c, g, t or u
  modified_base 20: mod_base = OTHER; note = uracil
  modified_base 33: mod_base = OTHER; note = uracil
  modified_base 41: mod_base = OTHER; note = uracil
  modified_base 43: mod_base = OTHER; note = uracil
  modified_base 46: mod_base = OTHER; note = uracil
  modified_base 48: mod_base = OTHER; note = uracil
  modified_base 50: mod_base = OTHER; note = uracil
  source 1..52: mol_type = other DNA
tctgtacggtgacaaggcgtnnnactnnntgatacacccctgtcctctctgt

SEQ ID NO: 981 - DNA, 51 bp, synthetic construct
  misc_feature 1..51: note = Synthetic Primer
  misc_difference 21..23: note = n is a, c, g, t or u
  misc_difference 27..29: note = n is a, c, g, t or u
  modified_base 20: mod_base = OTHER; note = uracil
  modified_base 33: mod_base = OTHER; note = uracil
  modified_base 42: mod_base = OTHER; note = uracil
  modified_base 47: mod_base = OTHER; note = uracil
  modified_base 49: mod_base = OTHER; note = uracil
  source 1..51: mol_type = other DNA
tctgtacggtgacaaggcgtnnnactnnntgatccgccccctgagctgtgt

SEQ ID NO: 982 - DNA, 50 bp, synthetic construct
  misc_feature 1..50: note = Synthetic Primer
  misc_difference 21..23: note = n is a, c, g, t or u
  misc_difference 27..29: note = n is a, c, g, t or u
  modified_base 20: mod_base = OTHER; note = uracil
  modified_base 33: mod_base = OTHER; note = uracil
  modified_base 44: mod_base = OTHER; note = uracil
  modified_base 46: mod_base = OTHER; note = uracil
  modified_base 48: mod_base = OTHER; note = uracil
  source 1..50: mol_type = other DNA
tctgtacggtgacaaggcgtnnnactnnntgatccaggacgggtgtgtgc

SEQ ID NO: 983 - DNA, 52 bp, synthetic construct
  misc_feature 1..52: note = Synthetic Primer
  misc_difference 21..23: note = n is a, c, g, t or u
  misc_difference 27..29: note = n is a, c, g, t or u
  modified_base 20: mod_base = OTHER; note = uracil
  modified_base 33: mod_base = OTHER; note = uracil
  modified_base 38: mod_base = OTHER; note = uracil
  modified_base 42: mod_base = OTHER; note = uracil
  modified_base 46: mod_base = OTHER; note = uracil
  source 1..52: mol_type = other DNA
tctgtacggtgacaaggcgtnnnactnnntgatcacgtgcctacctcggcca

SEQ ID NO: 984 - DNA, 50 bp, synthetic construct
  misc_feature 1..50: note = Synthetic Primer
  misc_difference 21..23: note = n is a, c, g, t or u
  misc_difference 27..29: note = n is a, c, g, t or u
  modified_base 20: mod_base = OTHER; note = uracil
  modified_base 33: mod_base = OTHER; note = uracil
  modified_base 41..42: mod_base = OTHER; note = uracil
  modified_base 44: mod_base = OTHER; note = uracil
  source 1..50: mol_type = other DNA
tctgtacggtgacaaggcgtnnnactnnntgatggacaccttctccggct

SEQ ID NO: 985 - DNA, 50 bp, synthetic construct
  misc_feature 1..50: note = Synthetic Primer
  misc_difference 21..23: note = n is a, c, g, t or u
  misc_difference 27..29: note = n is a, c, g, t or u
  modified_base 20: mod_base = OTHER; note = uracil
  modified_base 33..34: mod_base = OTHER; note = uracil
  modified_base 38: mod_base = OTHER; note = uracil
  modified_base 45: mod_base = OTHER; note = uracil
  source 1..50: mol_type = other DNA
tctgtacggtgacaaggcgtnnnactnnntgattccctgagggctgcacg

SEQ ID NO: 986 - DNA, 53 bp, synthetic construct
  misc_feature 1..53: note = Synthetic Primer
  misc_difference 21..23: note = n is a, c, g, t or u
  misc_difference 27..29: note = n is a, c, g, t or u
  modified_base 20: mod_base = OTHER; note = uracil
  modified_base 33: mod_base = OTHER; note = uracil
  modified_base 38..40: mod_base = OTHER; note = uracil
  modified_base 42..43: mod_base = OTHER; note = uracil
  modified_base 47: mod_base = OTHER; note = uracil
  modified_base 52: mod_base = OTHER; note = uracil
  source 1..53: mol_type = other DNA
tctgtacggtgacaaggcgtnnnactnnntgatcgcctttcttccctcccctc

SEQ ID NO: 987 - DNA, 51 bp, synthetic construct
  misc_feature 1..51: note = Synthetic Primer
  misc_difference 21..23: note = n is a, c, g, t or u
  misc_difference 27..29: note = n is a, c, g, t or u
  modified_base 20: mod_base = OTHER; note = uracil
  modified_base 33: mod_base = OTHER; note = uracil
  modified_base 36: mod_base = OTHER; note = uracil
  modified_base 47: mod_base = OTHER; note = uracil
  modified_base 49: mod_base = OTHER; note = uracil
  source 1..51: mol_type = other DNA
tctgtacggtgacaaggcgtnnnactnnntgatcatcccgggcgactgtgg

SEQ ID NO: 988 - DNA, 51 bp, synthetic construct
  misc_feature 1..51: note = Synthetic Primer
  misc_difference 21..23: note = n is a, c, g, t or u
  misc_difference 27..29: note = n is a, c, g, t or u
  modified_base 20: mod_base = OTHER; note = uracil
  modified_base 33: mod_base = OTHER; note = uracil
  modified_base 37: mod_base = OTHER; note = uracil
  modified_base 45: mod_base = OTHER; note = uracil
  modified_base 48: mod_base = OTHER; note = uracil
  source 1..51: mol_type = other DNA
tctgtacggtgacaaggcgtnnnactnnntgatagctgacaggctcctcgc

SEQ ID NO: 989 - DNA, 53 bp, synthetic construct
  misc_feature 1..53: note = Synthetic Primer
  misc_difference 21..23: note = n is a, c, g, t or u
  misc_difference 27..29: note = n is a, c, g, t or u
  modified_base 20: mod_base = OTHER; note = uracil
  modified_base 33: mod_base = OTHER; note = uracil
  modified_base 40: mod_base = OTHER; note = uracil
  modified_base 42..43: mod_base = OTHER; note = uracil
  modified_base 49: mod_base = OTHER; note = uracil
  source 1..53: mol_type = other DNA
tctgtacggtgacaaggcgtnnnactnnntgataggacctcttcgacatcgag

SEQ ID NO: 990 - DNA, 50 bp, synthetic construct
  misc_feature 1..50: note = Synthetic Primer
  misc_difference 21..23: note = n is a, c, g, t or u
  misc_difference 27..29: note = n is a, c, g, t or u
  modified_base 20: mod_base = OTHER; note = uracil
  modified_base 33: mod_base = OTHER; note = uracil
  modified_base 39..41: mod_base = OTHER; note = uracil
  modified_base 47: mod_base = OTHER; note = uracil
  source 1..50: mol_type = other DNA
tctgtacggtgacaaggcgtnnnactnnntgatgggcgtttgcagctggt

SEQ ID NO: 991 - DNA, 58 bp, synthetic construct
  misc_feature 1..58: note = Synthetic Primer
  misc_difference 21..23: note = n is a, c, g, t or u
  misc_difference 27..29: note = n is a, c, g, t or u
  modified_base 20: mod_base = OTHER; note = uracil
  modified_base 33: mod_base = OTHER; note = uracil
  modified_base 36: mod_base = OTHER; note = uracil
  modified_base 41: mod_base = OTHER; note = uracil
  modified_base 44: mod_base = OTHER; note = uracil
  modified_base 48: mod_base = OTHER; note = uracil
  modified_base 50: mod_base = OTHER; note = uracil
  modified_base 54: mod_base = OTHER; note = uracil
  modified_base 57: mod_base = OTHER; note = uracil
  source 1..58: mol_type = other DNA
tctgtacggtgacaaggcgtnnnactnnntgatcgtgaagtcctgagtgtagatgatg

SEQ ID NO: 992 - DNA, 54 bp, synthetic construct
  misc_feature 1..54: note = Synthetic Primer
  misc_difference 21..23: note = n is a, c, g, t or u
  misc_difference 27..29: note = n is a, c, g, t or u
  modified_base 20: mod_base = OTHER; note = uracil
  modified_base 33: mod_base = OTHER; note = uracil
  modified_base 38: mod_base = OTHER; note = uracil
  modified_base 49: mod_base = OTHER; note = uracil
  source 1..54: mol_type = other DNA
tctgtacggtgacaaggcgtnnnactnnntgatcagctgagcaccaaatccagg

SEQ ID NO: 993 - DNA, 51 bp, synthetic construct
  misc_feature 1..51: note = Synthetic Primer
  misc_difference 21..23: note = n is a, c, g, t or u
  misc_difference 27..29: note = n is a, c, g, t or u
  modified_base 20: mod_base = OTHER; note = uracil
  modified_base 33: mod_base = OTHER; note = uracil
  modified_base 36: mod_base = OTHER; note = uracil
  modified_base 47..48: mod_base = OTHER; note = uracil
  source 1..51: mol_type = other DNA
tctgtacggtgacaaggcgtnnnactnnntgatgctcaggccacacttgcc

SEQ ID NO: 994 - DNA, 52 bp, synthetic construct
  misc_feature 1..52: note = Synthetic Primer
  misc_difference 21..23: note = n is a, c, g, t or u
  misc_difference 27..29: note = n is a, c, g, t or u
  modified_base 20: mod_base = OTHER; note = uracil
  modified_base 33: mod_base = OTHER; note = uracil
  modified_base 38: mod_base = OTHER; note = uracil
  modified_base 50: mod_base = OTHER; note = uracil
  source 1..52: mol_type = other DNA
tgacaaggcgtagtcacggtnnnactnnntgatcccatggcaaacaccatga

SEQ ID NO: 995 - DNA, 65 bp, synthetic construct
  misc_feature 1..65: note = Synthetic Primer
  misc_difference 21..23: note = n is a, c, g, t or u
  misc_difference 27..29: note = n is a, c, g, t or u
  modified_base 20: mod_base = OTHER; note = uracil
  modified_base 33..35: mod_base = OTHER; note = uracil
  modified_base 39..42: mod_base = OTHER; note = uracil
  modified_base 44: mod_base = OTHER; note = uracil
  modified_base 47: mod_base = OTHER; note = uracil
  modified_base 51..54: mod_base = OTHER; note = uracil
  modified_base 58..59: mod_base = OTHER; note = uracil
  modified_base 62: mod_base = OTHER; note = uracil
  source 1..65: mol_type = other DNA
tgacaaggcgtagtcacggtnnnactnnntgatttcccttttgtactgaattttagattactgat

SEQ ID NO: 996 - DNA, 62 bp, synthetic construct
  misc_feature 1..62: note = Synthetic Primer
  misc_difference 21..23: note = n is a, c, g, t or u
  misc_difference 27..29: note = n is a, c, g, t or u
  modified_base 20: mod_base = OTHER; note = uracil
  modified_base 33..34: mod_base = OTHER; note = uracil
  modified_base 36..39: mod_base = OTHER; note = uracil
  modified_base 45..46: mod_base = OTHER; note = uracil
  modified_base 48: mod_base = OTHER; note = uracil
  modified_base 51: mod_base = OTHER; note = uracil
  modified_base 54: mod_base = OTHER; note = uracil
  source 1..62: mol_type = other DNA
tgacaaggcgtagtcacggtnnnactnnntgattattttcagccttctactagtcgaaagcg

SEQ ID NO: 997 - DNA, 55 bp, synthetic construct
  misc_feature 1..55: note = Synthetic Primer
  misc_difference 21..23: note = n is a, c, g, t or u
  misc_difference 27..29: note = n is a, c, g, t or u
  modified_base 20: mod_base = OTHER; note = uracil
  modified_base 33: mod_base = OTHER; note = uracil
  modified_base 44: mod_base = OTHER; note = uracil
  modified_base 54: mod_base = OTHER; note = uracil
  source 1..55: mol_type = other DNA
tgacaaggcgtagtcacggtnnnactnnntgataacgaccaagtcaccaaggatg

SEQ ID NO: 998 - DNA, 56 bp, synthetic construct
  misc_feature 1..56: note = Synthetic Primer
  misc_difference 21..23: note = n is a, c, g, t or u
  misc_difference 27..29: note = n is a, c, g, t or u
  modified_base 20: mod_base = OTHER; note = uracil
  modified_base 33..38: mod_base = OTHER; note = uracil
  modified_base 41: mod_base = OTHER; note = uracil
  modified_base 43: mod_base = OTHER; note = uracil
  modified_base 47: mod_base = OTHER; note = uracil
  modified_base 51..52: mod_base = OTHER; note = uracil
  modified_base 54: mod_base = OTHER; note = uracil
  source 1..56: mol_type = other DNA
tgacaaggcgtagtcacggtnnnactnnntgattttttcctctcactggcttctcc

SEQ ID NO: 999 - DNA, 57 bp, synthetic construct
  misc_feature 1..57: note = Synthetic Primer
  misc_difference 21..23: note = n is a, c, g, t or u
  misc_difference 27..29: note = n is a, c, g, t or u
  modified_base 20: mod_base = OTHER; note = uracil
  modified_base 33: mod_base = OTHER; note = uracil
  modified_base 40: mod_base = OTHER; note = uracil
  modified_base 42: mod_base = OTHER; note = uracil
  modified_base 45: mod_base = OTHER; note = uracil
  modified_base 48: mod_base = OTHER; note = uracil
  modified_base 53: mod_base = OTHER; note = uracil
  source 1..57: mol_type = other DNA
tgacaaggcgtagtcacggtnnnactnnntgataaaaactatgatggtgacgtgcag

SEQ ID NO: 1000 - DNA, 53 bp, synthetic construct
  misc_feature 1..53: note = Synthetic Primer
  misc_difference 21..23: note = n is a, c, g, t or u
  misc_difference 27..29: note = n is a, c, g, t or u
  modified_base 20: mod_base = OTHER; note = uracil
  modified_base 33: mod_base = OTHER; note = uracil
  modified_base 38: mod_base = OTHER; note = uracil
  modified_base 41: mod_base = OTHER; note = uracil
  modified_base 46: mod_base = OTHER; note = uracil
  modified_base 48..49: mod_base = OTHER; note = uracil
  source 1..53: mol_type = other DNA
tgacaaggcgtagtcacggtnnnactnnntgatcaggtcctcaagtcttcggg

SEQ ID NO: 1001 - DNA, 51 bp, synthetic construct
  misc_feature 1..51: note = Synthetic Primer
  misc_difference 21..23: note = n is a, c, g, t or u
  misc_difference 27..29: note = n is a, c, g, t or u
  modified_base 20: mod_base = OTHER; note = uracil
  modified_base 33: mod_base = OTHER; note = uracil
  modified_base 35: mod_base = OTHER; note = uracil
  modified_base 42: mod_base = OTHER; note = uracil
  modified_base 45: mod_base = OTHER; note = uracil
  modified_base 47: mod_base = OTHER; note = uracil
  modified_base 49: mod_base = OTHER; note = uracil
  source 1..51: mol_type = other DNA
tgacaaggcgtagtcacggtnnnactnnntgatctcacaggtcgtgtgtgc

SEQ ID NO: 1002 - DNA, 50 bp, synthetic construct
  misc_feature 1..50: note = Synthetic Primer
  misc_difference 21..23: note = n is a, c, g, t or u
  misc_difference 27..29: note = n is a, c, g, t or u
  modified_base 20: mod_base = OTHER; note = uracil
  modified_base 33: mod_base = OTHER; note = uracil
  modified_base 36: mod_base = OTHER; note = uracil
  modified_base 41: mod_base = OTHER; note = uracil
  source 1..50: mol_type = other DNA
tgacaaggcgtagtcacggtnnnactnnntgatactggcatgacccccac

SEQ ID NO: 1003 - DNA, 51 bp, synthetic construct
  misc_feature 1..51: note = Synthetic Primer
  misc_difference 21..23: note = n is a, c, g, t or u
  misc_difference 27..29: note = n is a, c, g, t or u
  modified_base 20: mod_base = OTHER; note = uracil
  modified_base 33..35: mod_base = OTHER; note = uracil
  modified_base 40..41: mod_base = OTHER; note = uracil
  modified_base 49: mod_base = OTHER; note = uracil
  source 1..51: mol_type = other DNA
tgacaaggcgtagtcacggtnnnactnnntgatttacccttggccgcgtac

SEQ ID NO: 1004 - DNA, 56 bp, synthetic construct
  misc_feature 1..56: note = Synthetic Primer
  misc_difference 21..23: note = n is a, c, g, t or u
  misc_difference 27..29: note = n is a, c, g, t or u
  modified_base 20: mod_base = OTHER; note = uracil
  modified_base 33: mod_base = OTHER; note = uracil
  modified_base 37: mod_base = OTHER; note = uracil
  modified_base 39..41: mod_base = OTHER; note = uracil
  modified_base 43..44: mod_base = OTHER; note = uracil
  modified_base 47: mod_base = OTHER; note = uracil
  modified_base 50..51: mod_base = OTHER; note = uracil
  source 1..56: mol_type = other DNA
tgacaaggcgtagtcacggtnnnactnnntgatgcatgtttgttggtgattccaag

SEQ ID NO: 1005 - DNA, 52 bp, synthetic construct
  misc_feature 1..52: note = Synthetic Primer
  misc_difference 21..23: note = n is a, c, g, t or u
  misc_difference 27..29: note = n is a, c, g, t or u
  modified_base 20: mod_base = OTHER; note = uracil
  modified_base 33: mod_base = OTHER; note = uracil
  modified_base 35..36: mod_base = OTHER; note = uracil
  modified_base 41: mod_base = OTHER; note = uracil
  modified_base 47: mod_base = OTHER; note = uracil
  source 1..52: mol_type = other DNA
tgacaaggcgtagtcacggtnnnactnnntgatcttgcagtggaactccacg

SEQ ID NO: 1006 - DNA, 59 bp, synthetic construct
  misc_feature 1..59: note = Synthetic Primer
  misc_difference 21..23: note = n is a, c, g, t or u
  misc_difference 27..29: note = n is a, c, g, t or u
  modified_base 20: mod_base = OTHER; note = uracil
  modified_base 33: mod_base = OTHER; note = uracil
  modified_base 38: mod_base = OTHER; note = uracil
  modified_base 40..41: mod_base = OTHER; note = uracil
  modified_base 44: mod_base = OTHER; note = uracil
  modified_base 48..51: mod_base = OTHER; note = uracil
  modified_base 53: mod_base = OTHER; note = uracil
  modified_base 55: mod_base = OTHER; note = uracil
  source 1..59: mol_type = other DNA
tgacaaggcgtagtcacggtnnnactnnntgatagcctcttgctcagttttatctaagg

SEQ ID NO: 1007 - DNA, 65 bp, synthetic construct
  misc_feature 1..65: note = Synthetic Primer
  misc_difference 21..23: note = n is a, c, g, t or u
  misc_difference 27..29: note = n is a, c, g, t or u
  modified_base 20: mod_base = OTHER; note = uracil
  modified_base 33..34: mod_base = OTHER; note = uracil
  modified_base 36: mod_base = OTHER; note = uracil
  modified_base 38: mod_base = OTHER; note = uracil
  modified_base 40: mod_base = OTHER; note = uracil
  modified_base 42: mod_base = OTHER; note = uracil
  modified_base 45: mod_base = OTHER; note = uracil
  modified_base 54..56: mod_base = OTHER; note = uracil
  modified_base 58: mod_base = OTHER; note = uracil
  modified_base 60..62: mod_base = OTHER; note = uracil
  source 1..65: mol_type = other DNA
tgacaaggcgtagtcacggtnnnactnnntgattgtctgtgtaatcaaacaagtttatatttccc

SEQ ID NO: 1008 - DNA, 58 bp, synthetic construct
  misc_feature 1..58: note = Synthetic Primer
  misc_difference 21..23: note = n is a, c, g, t or u
  misc_difference 27..29: note = n is a, c, g, t or u
  modified_base 20: mod_base = OTHER; note = uracil
  modified_base 33: mod_base = OTHER; note = uracil
  modified_base 39: mod_base = OTHER; note = uracil
  modified_base 41: mod_base = OTHER; note = uracil
  modified_base 46..47: mod_base = OTHER; note = uracil
  modified_base 55: mod_base = OTHER; note = uracil
  source 1..58: mol_type = other DNA
tgacaaggcgtagtcacggtnnnactnnntgataaccatatcaaattcacacactggc

SEQ ID NO: 1009 - DNA, 61 bp, synthetic construct
  misc_feature 1..61: note = Synthetic Primer
  misc_difference 21..23: note = n is a, c, g, t or u
  misc_difference 27..29: note = n is a, c, g, t or u
  modified_base 20: mod_base = OTHER; note = uracil
  modified_base 33: mod_base = OTHER; note = uracil
  modified_base 37: mod_base = OTHER; note = uracil
  modified_base 39: mod_base = OTHER; note = uracil
  modified_base 43..46: mod_base = OTHER; note = uracil
  modified_base 52..53: mod_base = OTHER; note = uracil
  modified_base 57: mod_base = OTHER; note = uracil
  modified_base 59: mod_base = OTHER; note = uracil
  source 1..61: mol_type = other DNA
tgacaaggcgtagtcacggtnnnactnnntgatgaatctccattttagcacttacctgtga

SEQ ID NO: 1010 - DNA, 65 bp, synthetic construct
  misc_feature 1..65: note = Synthetic Primer
  misc_difference 21..23: note = n is a, c, g, t or u
  misc_difference 27..29: note = n is a, c, g, t or u
  modified_base 20: mod_base = OTHER; note = uracil
  modified_base 33: mod_base = OTHER; note = uracil
  modified_base 37..38: mod_base = OTHER; note = uracil
  modified_base 48: mod_base = OTHER; note = uracil
  modified_base 53: mod_base = OTHER; note = uracil
  modified_base 57: mod_base = OTHER; note = uracil
  modified_base 63: mod_base = OTHER; note = uracil
  source 1..65: mol_type = other DNA
tgacaaggcgtagtcacggtnnnactnnntgatgaattaaacacacatcacatacatacaagtca

SEQ ID NO: 1011 - DNA, 61 bp, synthetic construct
  misc_feature 1..61: note = Synthetic Primer
  misc_difference 21..23: note = n is a, c, g, t or u
  misc_difference 27..29: note = n is a, c, g, t or u
  modified_base 20: mod_base = OTHER; note = uracil
  modified_base 33: mod_base = OTHER; note = uracil
  modified_base 39: mod_base = OTHER; note = uracil
  modified_base 45..47: mod_base = OTHER; note = uracil
  modified_base 51..53: mod_base = OTHER; note = uracil
  modified_base 57..58: mod_base = OTHER; note = uracil
  modified_base 60: mod_base = OTHER; note = uracil
  source 1..61: mol_type = other DNA
tgacaaggcgtagtcacggtnnnactnnntgataagcatcagcatttgactttaccttatc

SEQ ID NO: 1012 - DNA, 53 bp, synthetic construct
  misc_feature 1..53: note = Synthetic Primer
  misc_difference 21..23: note = n is a, c, g, t or u
  misc_difference 27..29: note = n is a, c, g, t or u
  modified_base 20: mod_base = OTHER; note = uracil
  modified_base 33: mod_base = OTHER; note = uracil
  modified_base 44: mod_base = OTHER; note = uracil
  modified_base 52: mod_base = OTHER; note = uracil
  source 1..53: mol_type = other DNA
tgacaaggcgtagtcacggtnnnactnnntgataagccgaaggtcacaaagtc

SEQ ID NO: 1013 - DNA, 65 bp, synthetic construct
  misc_feature 1..65: note = Synthetic Primer
  misc_difference 21..23: note = n is a, c, g, t or u
  misc_difference 27..29: note = n is a, c, g, t or u
  modified_base 20: mod_base = OTHER; note = uracil
  modified_base 33: mod_base = OTHER; note = uracil
  modified_base 38: mod_base = OTHER; note = uracil
  modified_base 43: mod_base = OTHER; note = uracil
  modified_base 45..46: mod_base = OTHER; note = uracil
  modified_base 48: mod_base = OTHER; note = uracil
  modified_base 50: mod_base = OTHER; note = uracil
  modified_base 53: mod_base = OTHER; note = uracil
  modified_base 59..61: mod_base = OTHER; note = uracil
  modified_base 63: mod_base = OTHER; note = uracil
  source 1..65: mol_type = other DNA
tgacaaggcgtagtcacggtnnnactnnntgatagaataggatattgtatcataccaatttctcg

SEQ ID NO: 1014 - DNA, 54 bp, synthetic construct
  misc_feature 1..54: note = Synthetic Primer
  misc_difference 21..23: note = n is a, c, g, t or u
  misc_difference 27..29: note = n is a, c, g, t or u
  modified_base 20: mod_base = OTHER; note = uracil
  modified_base 33: mod_base = OTHER; note = uracil
  modified_base 37..38: mod_base = OTHER; note = uracil
  modified_base 45: mod_base = OTHER; note = uracil
  modified_base 47: mod_base = OTHER; note = uracil
  modified_base 50..51: mod_base = OTHER; note = uracil
  modified_base 53: mod_base = OTHER; note = uracil
  source 1..54: mol_type = other DNA
tgacaaggcgtagtcacggtnnnactnnntgataccttcagcactctgcttgtg

SEQ ID NO: 1015 - DNA, 55 bp, synthetic construct
  misc_feature 1..55: note = Synthetic Primer
  misc_difference 21..23: note = n is a, c, g, t or u
  misc_difference 27..29: note = n is a, c, g, t or u
  modified_base 20: mod_base = OTHER; note = uracil
  modified_base 33: mod_base = OTHER; note = uracil
  modified_base 39: mod_base = OTHER; note = uracil
  modified_base 42: mod_base = OTHER; note = uracil
  modified_base 44..45: mod_base = OTHER; note = uracil
  modified_base 48: mod_base = OTHER; note = uracil
  modified_base 54: mod_base = OTHER; note = uracil
  source 1..55: mol_type = other DNA
tgacaaggcgtagtcacggtnnnactnnntgatccacatcctcttcctcaggatt

SEQ ID NO: 1016 - DNA, 57 bp, synthetic construct
  misc_feature 1..57: note = Synthetic Primer
  misc_difference 21..23: note = n is a, c, g, t or u
  misc_difference 27..29: note = n is a, c, g, t or u
  modified_base 20: mod_base = OTHER; note = uracil
  modified_base 33: mod_base = OTHER; note = uracil
  modified_base 35..36: mod_base = OTHER; note = uracil
  modified_base 41..43: mod_base = OTHER; note = uracil
  modified_base 50: mod_base = OTHER; note = uracil
  modified_base 55: mod_base = OTHER; note = uracil
  source 1..57: mol_type = other DNA
tgacaaggcgtagtcacggtnnnactnnntgatcttcacctttaacacctccagtcc

SEQ ID NO: 1017 - DNA, 55 bp, synthetic construct
  misc_feature 1..55: note = Synthetic Primer
  misc_difference 21..23: note = n is a, c, g, t or u
  misc_difference 27..29: note = n is a, c, g, t or u
  modified_base 20: mod_base = OTHER; note = uracil
  modified_base 33: mod_base = OTHER; note = uracil
  modified_base 36..37: mod_base = OTHER; note = uracil
  modified_base 45: mod_base = OTHER; note = uracil
  modified_base 49: mod_base = OTHER; note = uracil
  modified_base 54: mod_base = OTHER; note = uracil
  source 1..55: mol_type = other DNA
tgacaaggcgtagtcacggtnnnactnnntgatcgttgaagcactggatccactt

SEQ ID NO: 1018 - DNA, 58 bp, synthetic construct
  misc_feature 1..58: note = Synthetic Primer
  misc_difference 21..23: note = n is a, c, g, t or u
  misc_difference 27..29: note = n is a, c, g, t or u
  modified_base 20: mod_base = OTHER; note = uracil
  modified_base 33: mod_base = OTHER; note = uracil
  modified_base 38: mod_base = OTHER; note = uracil
  modified_base 44..45: mod_base = OTHER; note = uracil
  modified_base 48: mod_base = OTHER; note = uracil
  modified_base 50: mod_base = OTHER; note = uracil
  modified_base 57: mod_base = OTHER; note = uracil
  source 1..58: mol_type = other DNA
tgacaaggcgtagtcacggtnnnactnnntgatcacctggaacttggtctcaaagatt

SEQ ID NO: 1019 - DNA, 57 bp, synthetic construct
  misc_feature 1..57: note = Synthetic Primer
  misc_difference 21..23: note = n is a, c, g, t or u
  misc_difference 27..29: note = n is a, c, g, t or u
  modified_base 20: mod_base = OTHER; note = uracil
  modified_base 33..34: mod_base = OTHER; note = uracil
  modified_base 39..40: mod_base = OTHER; note = uracil
  modified_base 43: mod_base = OTHER; note = uracil
  modified_base 51..52: mod_base = OTHER; note = uracil
  modified_base 56: mod_base = OTHER; note = uracil
  source 1..57: mol_type = other DNA
tgacaaggcgtagtcacggtnnnactnnntgattgcagttggtggaaccattaactc

SEQ ID NO: 1020 - DNA, 59 bp, synthetic construct
  misc_feature 1..59: note = Synthetic Primer
  misc_difference 21..23: note = n is a, c, g, t or u
  misc_difference 27..29: note = n is a, c, g, t or u
  modified_base 20: mod_base = OTHER; note = uracil
  modified_base 33: mod_base = OTHER; note = uracil
  modified_base 35..36: mod_base = OTHER; note = uracil
  modified_base 38: mod_base = OTHER; note = uracil
  modified_base 42: mod_base = OTHER; note = uracil
  modified_base 46: mod_base = OTHER; note = uracil
  modified_base 50: mod_base = OTHER; note = uracil
  modified_base 57: mod_base = OTHER; note = uracil
  source 1..59: mol_type = other DNA
tgacaaggcgtagtcacggtnnnactnnntgatcttgtgagtggatgggtaaaacctat

SEQ ID NO: 1021 - DNA, 58 bp, synthetic construct
  misc_feature 1..58: note = Synthetic Primer
  misc_difference 21..23: note = n is a, c, g, t or u
  misc_difference 27..29: note = n is a, c, g, t or u
  modified_base 20: mod_base = OTHER; note = uracil
  modified_base 33..34: mod_base = OTHER; note = uracil
  modified_base 36: mod_base = OTHER; note = uracil
  modified_base 40: mod_base = OTHER; note = uracil
  modified_base 43: mod_base = OTHER; note = uracil
  modified_base 47..48: mod_base = OTHER; note = uracil
  modified_base 56: mod_base = OTHER; note = uracil
  source 1..58: mol_type = other DNA
tgacaaggcgtagtcacggtnnnactnnntgattgtgggtcctgaattggaggaatat

SEQ ID NO: 1022 - DNA, 53 bp, synthetic construct
  misc_feature 1..53: note = Synthetic Primer
  misc_difference 21..23: note = n is a, c, g, t or u
  misc_difference 27..29: note = n is a, c, g, t or u
  modified_base 20: mod_base = OTHER; note = uracil
  modified_base 33: mod_base = OTHER; note = uracil
  modified_base 39: mod_base = OTHER; note = uracil
  modified_base 44..45: mod_base = OTHER; note = uracil
  modified_base 48: mod_base = OTHER; note = uracil
  source 1..53: mol_type = other DNA
tgacaaggcgtagtcacggtnnnactnnntgatacacctggccttcatacacc

SEQ ID NO: 1023 - DNA, 52 bp, synthetic construct
  misc_feature 1..52: note = Synthetic Primer
  misc_difference 21..23: note = n is a, c, g, t or u
  misc_difference 27..29: note = n is a, c, g, t or u
  modified_base 20: mod_base = OTHER; note = uracil
  modified_base 33: mod_base = OTHER; note = uracil
  modified_base 35: mod_base = OTHER; note = uracil
  modified_base 40..41: mod_base = OTHER; note = uracil
  modified_base 43: mod_base = OTHER; note = uracil
  modified_base 45: mod_base = OTHER; note = uracil
  source 1..52: mol_type = other DNA
tgacaaggcgtagtcacggtnnnactnnntgatctccccttctctgcccaga

SEQ ID NO: 1024 - DNA, 52 bp, synthetic construct
  misc_feature 1..52: note = Synthetic Primer
  misc_difference 21..23: note = n is a, c, g, t or u
  misc_difference 27..29: note = n is a, c, g, t or u
  modified_base 20: mod_base = OTHER; note = uracil
  modified_base 33: mod_base = OTHER; note = uracil
  modified_base 35..36: mod_base = OTHER; note = uracil
  modified_base 43: mod_base = OTHER; note = uracil
  source 1..52: mol_type = other DNA
tgacaaggcgtagtcacggtnnnactnnntgatattgcaggctcaccccaat

SEQ ID NO: 1025 - DNA, 51 bp, synthetic construct
  misc_feature 1..51: note = Synthetic Primer
  misc_difference 21..23: note = n is a, c, g, t or u
  misc_difference 27..29: note = n is a, c, g, t or u
  modified_base 20: mod_base = OTHER; note = uracil
  modified_base 33: mod_base = OTHER; note = uracil
  modified_base 35: mod_base = OTHER; note = uracil
  modified_base 41: mod_base = OTHER; note = uracil
  modified_base 46: mod_base = OTHER; note = uracil
  modified_base 50: mod_base = OTHER; note = uracil
  source 1..51: mol_type = other DNA
tgacaaggcgtagtcacggtnnnactnnntgatgtgagcctgcaatccctg

SEQ ID NO: 1026 - DNA, 52 bp, synthetic construct
  misc_feature 1..52: note = Synthetic Primer
  misc_difference 21..23: note = n is a, c, g, t or u
  misc_difference 27..29: note = n is a, c, g, t or u
  modified_base 20: mod_base = OTHER; note = uracil
  modified_base 33: mod_base = OTHER; note = uracil
  modified_base 37: mod_base = OTHER; note = uracil
  modified_base 40: mod_base = OTHER; note = uracil
  modified_base 46..47: mod_base = OTHER; note = uracil
  modified_base 49: mod_base = OTHER; note = uracil
  source 1..52: mol_type = other DNA
tgacaaggcgtagtcacggtnnnactnnntgatccatgctggaccttctgca

SEQ ID NO: 1027 - DNA, 52 bp, synthetic construct
  misc_feature 1..52: note = Synthetic Primer
  misc_difference 21..23: note = n is a, c, g, t or u
  misc_difference 27..29: note = n is a, c, g, t or u
  modified_base 20: mod_base = OTHER; note = uracil
  modified_base 33: mod_base = OTHER; note = uracil
  modified_base 36: mod_base = OTHER; note = uracil
  modified_base 38..39: mod_base = OTHER; note = uracil
  modified_base 44: mod_base = OTHER; note = uracil
  modified_base 46: mod_base = OTHER; note = uracil
  source 1..52: mol_type = other DNA
tgacaaggcgtagtcacggtnnnactnnntgatcctcttgacctgtccaggc

SEQ ID NO: 1028 - DNA, 56 bp, synthetic construct
  misc_feature 1..56: note = Synthetic Primer
  misc_difference 21..23: note = n is a, c, g, t or u
  misc_difference 27..29: note = n is a, c, g, t or u
  modified_base 20: mod_base = OTHER; note = uracil
  modified_base 33: mod_base = OTHER; note = uracil
  modified_base 35..36: mod_base = OTHER; note = uracil
  modified_base 42..44: mod_base = OTHER; note = uracil
  modified_base 46: mod_base = OTHER; note = uracil
  modified_base 51..53: mod_base = OTHER; note = uracil
  source 1..56: mol_type = other DNA
tgacaaggcgtagtcacggtnnnactnnntgatgttgccactttctcaactttccc

SEQ ID NO: 1029 - DNA, 56 bp, synthetic construct
  misc_feature 1..56: note = Synthetic Primer
  misc_difference 21..23: note = n is a, c, g, t or u
  misc_difference 27..29: note = n is a, c, g, t or u
  modified_base 20: mod_base = OTHER; note = uracil
  modified_base 33: mod_base = OTHER; note = uracil
  modified_base 37: mod_base = OTHER; note = uracil
  modified_base 53: mod_base = OTHER; note = uracil
  source 1..56: mol_type = other DNA
tgacaaggcgtagtcacggtnnnactnnntgatacatcagagaaagggaccctagt

SEQ ID NO: 1030 - DNA, 56 bp, synthetic construct
  misc_feature 1..56: note = Synthetic Primer
  misc_difference 21..23: note = n is a, c, g, t or u
  misc_difference 27..29: note = n is a, c, g, t or u
  modified_base 20: mod_base = OTHER; note = uracil
  modified_base 33: mod_base = OTHER; note = uracil
  modified_base 39..40: mod_base = OTHER; note = uracil
  modified_base 42: mod_base = OTHER; note = uracil
  modified_base 45: mod_base = OTHER; note = uracil
  modified_base 50: mod_base = OTHER; note = uracil
  modified_base 52: mod_base = OTHER; note = uracil
  modified_base 54: mod_base = OTHER; note = uracil
  source 1..56: mol_type = other DNA
tgacaaggcgtagtcacggtnnnactnnntgatcaaccttgtcctaacctctctcc

SEQ ID NO: 1031 - DNA, 56 bp, synthetic construct
  misc_feature 1..56: note = Synthetic Primer
  misc_difference 21..23: note = n is a, c, g, t or u
  misc_difference 27..29: note = n is a, c, g, t or u
  modified_base 20: mod_base = OTHER; note = uracil
  modified_base 33: mod_base = OTHER; note = uracil
  modified_base 36: mod_base = OTHER; note = uracil
  modified_base 39..41: mod_base = OTHER; note = uracil
  modified_base 43: mod_base = OTHER; note = uracil
  modified_base 46: mod_base = OTHER; note = uracil
  modified_base 50: mod_base = OTHER; note = uracil
  modified_base 53: mod_base = OTHER; note = uracil
  source 1..56: mol_type = other DNA
tgacaaggcgtagtcacggtnnnactnnntgatcctcatttctcctccatcctcag

SEQ ID NO: 1032 - DNA, 52 bp, synthetic construct
  misc_feature 1..52: note = Synthetic Primer
  misc_difference 21..23: note = n is a, c, g, t or u
  misc_difference 27..29: note = n is a, c, g, t or u
  modified_base 20: mod_base = OTHER; note = uracil
  modified_base 33: mod_base = OTHER; note = uracil
  modified_base 35: mod_base = OTHER; note = uracil
  modified_base 42: mod_base = OTHER; note = uracil
  source 1..52: mol_type = other DNA
tgacaaggcgtagtcacggtnnnactnnntgatatcagaactgccgaccaca

SEQ ID NO: 1033 - DNA, 65 bp, synthetic construct
  misc_feature 1..65: note = Synthetic Primer
  misc_difference 21..23: note = n is a, c, g, t or u
  misc_difference 27..29: note = n is a, c, g, t or u
  modified_base 20: mod_base = OTHER; note = uracil
  modified_base 33: mod_base = OTHER; note = uracil
  modified_base 35: mod_base = OTHER; note = uracil
  modified_base 39: mod_base = OTHER; note = uracil
  modified_base 41: mod_base = OTHER; note = uracil
  modified_base 44..45: mod_base = OTHER; note = uracil
  modified_base 54: mod_base = OTHER; note = uracil
  modified_base 56..57: mod_base = OTHER; note = uracil
  modified_base 62: mod_base = OTHER; note = uracil
  source 1..65: mol_type = other DNA
tgacaaggcgtagtcacggtnnnactnnntgatctagatatggttaagaaaactgttccaataca

SEQ ID NO: 1034 - DNA, 52 bp, synthetic construct
  misc_feature 1..52: note = Synthetic Primer
  misc_difference 21..23: note = n is a, c, g, t or u
  misc_difference 27..29: note = n is a, c, g, t or u
  modified_base 20: mod_base = OTHER; note = uracil
  modified_base 33: mod_base = OTHER; note = uracil
  modified_base 35: mod_base = OTHER; note = uracil
  modified_base 38: mod_base = OTHER; note = uracil
  modified_base 40: mod_base = OTHER; note = uracil
  modified_base 42: mod_base = OTHER; note = uracil
  modified_base 45: mod_base = OTHER; note = uracil
  source 1..52: mol_type = other DNA
tgacaaggcgtagtcacggtnnnactnnntgatctgctgtgtgctggcagat

SEQ ID NO: 1035 - DNA, 51 bp, synthetic construct
  misc_feature 1..51: note = Synthetic Primer
  misc_difference 21..23: note = n is a, c, g, t or u
  misc_difference 27..29: note = n is a, c, g, t or u
  modified_base 20: mod_base = OTHER; note = uracil
  modified_base 33: mod_base = OTHER; note = uracil
  modified_base 39: mod_base = OTHER; note = uracil
  modified_base 42: mod_base = OTHER; note = uracil
  source 1..51: mol_type = other DNA
tgacaaggcgtagtcacggtnnnactnnntgatccagatcatccgcgagct

SEQ ID NO: 1036 - DNA, 55 bp, synthetic construct
  misc_feature 1..55: note = Synthetic Primer
  misc_difference 21..23: note = n is a, c, g, t or u
  misc_difference 27..29: note = n is a, c, g, t or u
  modified_base 20: mod_base = OTHER; note = uracil
  modified_base 33: mod_base = OTHER; note = uracil
  modified_base 35: mod_base = OTHER; note = uracil
  modified_base 39: mod_base = OTHER; note = uracil
  modified_base 42: mod_base = OTHER; note = uracil
  modified_base 49: mod_base = OTHER; note = uracil
  modified_base 51: mod_base = OTHER; note = uracil
  modified_base 53: mod_base = OTHER; note = uracil
  source 1..55: mol_type = other DNA
tgacaaggcgtagtcacggtnnnactnnntgatctggatcctcaggactctgtct

SEQ ID NO: 1037 - DNA, 56 bp, synthetic construct
  misc_feature 1..56: note = Synthetic Primer
  misc_difference 21..23: note = n is a, c, g, t or u
  misc_difference 27..29: note = n is a, c, g, t or u
  modified_base 20: mod_base = OTHER; note = uracil
  modified_base 33: mod_base = OTHER; note = uracil
  modified_base 36: mod_base = OTHER; note = uracil
  modified_base 38: mod_base = OTHER; note = uracil
  modified_base 42: mod_base = OTHER; note = uracil
  modified_base 45: mod_base = OTHER; note = uracil
  modified_base 48: mod_base = OTHER; note = uracil
  modified_base 50: mod_base = OTHER; note = uracil
  modified_base 52: mod_base = OTHER; note = uracil
  modified_base 54: mod_base = OTHER; note = uracil
  source 1..56: mol_type = other DNA
tgacaaggcgtagtcacggtnnnactnnntgatcatctgcatggtactctgtctcg

SEQ ID NO: 1038 - DNA, 53 bp, synthetic construct
  misc_feature 1..53: note = Synthetic Primer
  misc_difference 21..23: note = n is a, c, g, t or u
  misc_difference 27..29: note = n is a, c, g, t or u
  modified_base 20: mod_base = OTHER; note = uracil
  modified_base 33: mod_base = OTHER; note = uracil
  modified_base 49: mod_base = OTHER; note = uracil
  modified_base 51: mod_base = OTHER; note = uracil
  source 1..53: mol_type = other DNA
tgacaaggcgtagtcacggtnnnactnnntgatagaaggcgggagacatatgg

SEQ ID NO: 1039 - DNA, 52 bp, synthetic construct
  misc_feature 1..52: note = Synthetic Primer
  misc_difference 21..23: note = n is a, c, g, t or u
  misc_difference 27..29: note = n is a, c, g, t or u
  modified_base 20: mod_base = OTHER; note = uracil
  modified_base 33: mod_base = OTHER; note = uracil
  modified_base 37..40: mod_base = OTHER; note = uracil
  modified_base 49: mod_base = OTHER; note = uracil
  source 1..52: mol_type = other DNA
tgacaaggcgtagtcacggtnnnactnnntgatcggttttcccggacatggt

SEQ ID NO: 1040 - DNA, 54 bp, synthetic construct
  misc_feature 1..54: note = Synthetic Primer
  misc_difference 21..23: note = n is a, c, g, t or u
  misc_difference 27..29: note = n is a, c, g, t or u
  modified_base 20: mod_base = OTHER; note = uracil
  modified_base 33: mod_base = OTHER; note = uracil
  modified_base 38: mod_base = OTHER; note = uracil
  modified_base 48: mod_base = OTHER; note = uracil
  modified_base 52: mod_base = OTHER; note = uracil
  source 1..54: mol_type = other DNA
tgacaaggcgtagtcacggtnnnactnnntgatcccatcacacaccataactcc

SEQ ID NO: 1041 - DNA, 52 bp, synthetic construct
  misc_feature 1..52: note = Synthetic Primer
  misc_difference 21..23: note = n is a, c, g, t or u
  misc_difference 27..29: note = n is a, c, g, t or u
  modified_base 20: mod_base = OTHER; note = uracil
  modified_base 33: mod_base = OTHER; note = uracil
  modified_base 35: mod_base = OTHER; note = uracil
  modified_base 37..38: mod_base = OTHER; note = uracil
  modified_base 49..50: mod_base = OTHER; note = uracil
  source 1..52: mol_type = other DNA
tgacaaggcgtagtcacggtnnnactnnntgatctcttgaccagcacgttcc

SEQ ID NO: 1042 - DNA, 53 bp, synthetic construct
  misc_feature 1..53: note = Synthetic Primer
  misc_difference 21..23: note = n is a, c, g, t or u
  misc_difference 27..29: note = n is a, c, g, t or u
  modified_base 20: mod_base = OTHER; note = uracil
  modified_base 33..34: mod_base = OTHER; note = uracil
  modified_base 37..38: mod_base = OTHER; note = uracil
  modified_base 41: mod_base = OTHER; note = uracil
  modified_base 43: mod_base = OTHER; note = uracil
  modified_base 46: mod_base = OTHER; note = uracil
  modified_base 49: mod_base = OTHER; note = uracil
  source 1..53: mol_type = other DNA
tgacaaggcgtagtcacggtnnnactnnntgattccttcctgtcctcctagca

SEQ ID NO: 1043 - DNA, 53 bp, synthetic construct
  misc_feature 1..53: note = Synthetic Primer
  misc_difference 21..23: note = n is a, c, g, t or u
  misc_difference 27..29: note = n is a, c, g, t or u
  modified_base 20: mod_base = OTHER; note = uracil
  modified_base 33: mod_base = OTHER; note = uracil
  modified_base 38: mod_base = OTHER; note = uracil
  modified_base 41: mod_base = OTHER; note = uracil
  modified_base 43: mod_base = OTHER; note = uracil
  modified_base 46..47: mod_base = OTHER; note = uracil
  source 1..53: mol_type = other DNA
tgacaaggcgtagtcacggtnnnactnnntgatcgcatcgtgtacttccggat

SEQ ID NO: 1044 - DNA, 54 bp, synthetic construct
  misc_feature 1..54: note = Synthetic Primer
  misc_difference 21..23: note = n is a, c, g, t or u
  misc_difference 27..29: note = n is a, c, g, t or u
  modified_base 20: mod_base = OTHER; note = uracil
  modified_base 33: mod_base = OTHER; note = uracil
  modified_base 37..38: mod_base = OTHER; note = uracil
  modified_base 40: mod_base = OTHER; note = uracil
  modified_base 49: mod_base = OTHER; note = uracil
  modified_base 51: mod_base = OTHER; note = uracil
  modified_base 53: mod_base = OTHER; note = uracil
  source 1..54: mol_type = other DNA
tgacaaggcgtagtcacggtnnnactnnntgatcacttctcacaccgctgtgtt

SEQ ID NO: 1045 - DNA, 60 bp, synthetic construct
  misc_feature 1..60: note = Synthetic Primer
  misc_difference 21..23: note = n is a, c, g, t or u
  misc_difference 27..29: note = n is a, c, g, t or u
  modified_base 20: mod_base = OTHER; note = uracil
  modified_base 33..34: mod_base = OTHER; note = uracil
  modified_base 36: mod_base = OTHER; note = uracil
  modified_base 41: mod_base = OTHER; note = uracil
  modified_base 43..45: mod_base = OTHER; note = uracil
  modified_base 49: mod_base = OTHER; note = uracil
  source 1..60: mol_type = other DNA
tgacaaggcgtagtcacggtnnnactnnntgattgtggagtatttggatgacagaaacac

SEQ ID NO: 1046 - DNA, 50 bp, synthetic construct
  misc_feature 1..50: note = Synthetic Primer
  misc_difference 21..23: note = n is a, c, g, t or u
  misc_difference 27..29: note = n is a, c, g, t or u
  modified_base 20: mod_base = OTHER; note = uracil
  modified_base 33: mod_base = OTHER; note = uracil
  modified_base 46: mod_base = OTHER; note = uracil
  modified_base 49: mod_base = OTHER; note = uracil
  source 1..50: mol_type = other DNA
tgacaaggcgtagtcacggtnnnactnnntgatagacgacagggctggtt

SEQ ID NO: 1047 - DNA, 59 bp, synthetic construct
  misc_feature 1..59: note = Synthetic Primer
  misc_difference 21..23: note = n is a, c, g, t or u
  misc_difference 27..29: note = n is a, c, g, t or u
  modified_base 20: mod_base = OTHER; note = uracil
  modified_base 33: mod_base = OTHER; note = uracil
  modified_base 36: mod_base = OTHER; note = uracil
  modified_base 51: mod_base = OTHER; note = uracil
  modified_base 53..54: mod_base = OTHER; note = uracil
  modified_base 56: mod_base = OTHER; note = uracil
  modified_base 58: mod_base = OTHER; note = uracil
  source 1..59: mol_type = other DNA
tgacaaggcgtagtcacggtnnnactnnntgatgctgaaacaaaaagcactcttctgtc

SEQ ID NO: 1048 - DNA, 53 bp, synthetic construct
  misc_feature 1..53: note = Synthetic Primer
  misc_difference 21..23: note = n is a, c, g, t or u
  misc_difference 27..29: note = n is a, c, g, t or u
  modified_base 20: mod_base = OTHER; note = uracil
  modified_base 33..34: mod_base = OTHER; note = uracil
  modified_base 40: mod_base = OTHER; note = uracil
  modified_base 42: mod_base = OTHER; note = uracil
  modified_base 51: mod_base = OTHER; note = uracil
  source 1..53: mol_type = other DNA
tgacaaggcgtagtcacggtnnnactnnntgattggccatctacaagcagtca

SEQ ID NO: 1049 - DNA, 54 bp, synthetic construct
  misc_feature 1..54: note = Synthetic Primer
  misc_difference 21..23: note = n is a, c, g, t or u
  misc_difference 27..29: note = n is a, c, g, t or u
  modified_base 20: mod_base = OTHER; note = uracil
  modified_base 33..35: mod_base = OTHER; note = uracil
  modified_base 38: mod_base = OTHER; note = uracil
  modified_base 43: mod_base = OTHER; note = uracil
  modified_base 46: mod_base = OTHER; note = uracil
  modified_base 51: mod_base = OTHER; note = uracil
  source 1..54: mol_type = other DNA
tgacaaggcgtagtcacggtnnnactnnntgatttcctacagtactcccctgcc

SEQ ID NO: 1050 - DNA, 55 bp, synthetic construct
  misc_feature 1..55: note = Synthetic Primer
  misc_difference 21..23: note = n is a, c, g, t or u
  misc_difference 27..29: note = n is a, c, g, t or u
  modified_base 20: mod_base = OTHER; note = uracil
  modified_base 33..34: mod_base = OTHER; note = uracil
  modified_base 38: mod_base = OTHER; note = uracil
  modified_base 40..41: mod_base = OTHER; note = uracil
  modified_base 44..45: mod_base = OTHER; note = uracil
  modified_base 47: mod_base = OTHER; note = uracil
  modified_base 49..52: mod_base = OTHER; note = uracil
  source 1..55: mol_type = other DNA
tgacaaggcgtagtcacggtnnnactnnntgattgcctcttgcttctcttttcct

SEQ ID NO: 1051 - DNA, 53 bp, synthetic construct
  misc_feature 1..53: note = Synthetic Primer
  misc_difference 21..23: note = n is a, c, g, t or u
  misc_difference 27..29: note = n is a, c, g, t or u
  modified_base 20: mod_base = OTHER; note = uracil
  modified_base 33..35: mod_base = OTHER; note = uracil
  modified_base 39: mod_base = OTHER; note = uracil
  modified_base 41: mod_base = OTHER; note = uracil
  modified_base 45: mod_base = OTHER; note = uracil
  modified_base 47: mod_base = OTHER; note = uracil
  source 1..53: mol_type = other DNA
tgacaaggcgtagtcacggtnnnactnnntgatttggctctgactgtaccacc

SEQ ID NO: 1052 - DNA, 57 bp, synthetic construct
  misc_feature 1..57: note = Synthetic Primer
  misc_difference 21..23: note = n is a, c, g, t or u
  misc_difference 27..29: note = n is a, c, g, t or u
  modified_base 20: mod_base = OTHER; note = uracil
  modified_base 33..35: mod_base = OTHER; note = uracil
  modified_base 43: mod_base = OTHER; note = uracil
  modified_base 47..49: mod_base = OTHER; note = uracil
  modified_base 51: mod_base = OTHER; note = uracil
  modified_base 56: mod_base = OTHER; note = uracil
  source 1..57: mol_type = other DNA
tgacaaggcgtagtcacggtnnnactnnntgatttacagccctggatttgtcaagtt

SEQ ID NO: 1053 - DNA, 52 bp, synthetic construct
  misc_feature 1..52: note = Synthetic Primer
  misc_difference 21..23: note = n is a, c, g, t or u
  misc_difference 27..29: note = n is a, c, g, t or u
  modified_base 20: mod_base = OTHER; note = uracil
  modified_base 33: mod_base = OTHER; note = uracil
  modified_base 35: mod_base = OTHER; note = uracil
  modified_base 38: mod_base = OTHER; note = uracil
  modified_base 42: mod_base = OTHER; note = uracil
  modified_base 46: mod_base = OTHER; note = uracil
  source 1..52: mol_type = other DNA
tgacaaggcgtagtcacggtnnnactnnntgatctagtccctggctggacca

SEQ ID NO: 1054 - DNA, 59 bp, synthetic construct
  misc_feature 1..59: note = Synthetic Primer
  misc_difference 21..23: note = n is a, c, g, t or u
  misc_difference 27..29: note = n is a, c, g, t or u
  modified_base 20: mod_base = OTHER; note = uracil
  modified_base 33: mod_base = OTHER; note = uracil
  modified_base 35: mod_base = OTHER; note = uracil
  modified_base 43..44: mod_base = OTHER; note = uracil
  modified_base 50: mod_base = OTHER; note = uracil
  source 1..59: mol_type = other DNA
tgacaaggcgtagtcacggtnnnactnnntgatctcacagagttcaagctgaagaagat

SEQ ID NO: 1055 - DNA, 51 bp, synthetic construct
  misc_feature 1..51: note = Synthetic Primer
  misc_difference 21..23: note = n is a, c, g, t or u
  misc_difference 27..29: note = n is a, c, g, t or u
  modified_base 20: mod_base = OTHER; note = uracil
  modified_base 33: mod_base = OTHER; note = uracil
  modified_base 38: mod_base = OTHER; note = uracil
  modified_base 45: mod_base = OTHER; note = uracil
  source 1..51: mol_type = other DNA
tgacaaggcgtagtcacggtnnnactnnntgataacctgcagcatgagcac

SEQ ID NO: 1056 - DNA, 55 bp, synthetic construct
  misc_feature 1..55: note = Synthetic Primer
  misc_difference 21..23: note = n is a, c, g, t or u
  misc_difference 27..29: note = n is a, c, g, t or u
  modified_base 20: mod_base = OTHER; note = uracil
  modified_base 33: mod_base = OTHER; note = uracil
  modified_base 35: mod_base = OTHER; note = uracil
  modified_base 38..39: mod_base = OTHER; note = uracil
  modified_base 48: mod_base = OTHER; note = uracil
  modified_base 50: mod_base = OTHER; note = uracil
  modified_base 53: mod_base = OTHER; note = uracil
  source 1..55: mol_type = other DNA
tgacaaggcgtagtcacggtnnnactnnntgatctggttggagcgaatctgctag

SEQ ID NO: 1057 - DNA, 52 bp, synthetic construct
  misc_feature 1..52: note = Synthetic Primer
  misc_difference 21..23: note = n is a, c, g, t or u
  misc_difference 27..29: note = n is a, c, g, t or u
  modified_base 20: mod_base = OTHER; note = uracil
  modified_base 33: mod_base = OTHER; note = uracil
  modified_base 35..36: mod_base = OTHER; note = uracil
  modified_base 38: mod_base = OTHER; note = uracil
  source 1..52: mol_type = other DNA
tgacaaggcgtagtcacggtnnnactnnntgatcttgtgcccacgaaggagt

SEQ ID NO: 1058 - DNA, 55 bp, synthetic construct
  misc_feature 1..55: note = Synthetic Primer
  misc_difference 21..23: note = n is a, c, g, t or u
  misc_difference 27..29: note = n is a, c, g, t or u
  modified_base 20: mod_base = OTHER; note = uracil
  modified_base 33: mod_base = OTHER; note = uracil
  modified_base 37: mod_base = OTHER; note = uracil
  modified_base 40: mod_base = OTHER; note = uracil
  modified_base 43: mod_base = OTHER; note = uracil
  modified_base 45: mod_base = OTHER; note = uracil
  modified_base 51: mod_base = OTHER; note = uracil
  source 1..55: mol_type = other DNA
tgacaaggcgtagtcacggtnnnactnnntgatagatactgatctcgccatcgct

SEQ ID NO: 1059 - DNA, 59 bp, synthetic construct
  misc_feature 1..59: note = Synthetic Primer
  misc_difference 21..23: note = n is a, c, g, t or u
  misc_difference 27..29: note = n is a, c, g, t or u
  modified_base 20: mod_base = OTHER; note = uracil
  modified_base 33: mod_base = OTHER; note = uracil
  modified_base 36: mod_base = OTHER; note = uracil
  modified_base 38..39: mod_base = OTHER; note = uracil
  modified_base 41: mod_base = OTHER; note = uracil
  modified_base 47: mod_base = OTHER; note = uracil
  modified_base 50: mod_base = OTHER; note = uracil
  modified_base 53: mod_base = OTHER; note = uracil
  modified_base 56..57: mod_base = OTHER; note = uracil
  source 1..59: mol_type = other DNA
tgacaaggcgtagtcacggtnnnactnnntgatgatcttctcaaagtcgtcatccttca

SEQ ID NO: 1060 - DNA, 53 bp, synthetic construct
  misc_feature 1..53: note = Synthetic Primer
  misc_difference 21..23: note = n is a, c, g, t or u
  misc_difference 27..29: note = n is a, c, g, t or u
  modified_base 20: mod_base = OTHER; note = uracil
  modified_base 33: mod_base = OTHER; note = uracil
  modified_base 35: mod_base = OTHER; note = uracil
  modified_base 40: mod_base = OTHER; note = uracil
  modified_base 42: mod_base = OTHER; note = uracil
  modified_base 46: mod_base = OTHER; note = uracil
  modified_base 50: mod_base = OTHER; note = uracil
  modified_base 52: mod_base = OTHER; note = uracil
  source 1..53: mol_type = other DNA
tgacaaggcgtagtcacggtnnnactnnntgatgtagagtgtgcgtggctctc

SEQ ID NO: 1061 - DNA, 54 bp, synthetic construct
  misc_feature 1..54: note = Synthetic Primer
  misc_difference 21..23: note = n is a, c, g, t or u
  misc_difference 27..29: note = n is a, c, g, t or u
  modified_base 20: mod_base = OTHER; note = uracil
  modified_base 33: mod_base = OTHER; note = uracil
  modified_base 39..40: mod_base = OTHER; note = uracil
  modified_base 43..44: mod_base = OTHER; note = uracil
  modified_base 48: mod_base = OTHER; note = uracil
  source 1..54: mol_type = other DNA
tgacaaggcgtagtcacggtnnnactnnntgatgcaccttcattggctacaagg

SEQ ID NO: 1062 - DNA, 53 bp, synthetic construct
  misc_feature 1..53: note = Synthetic Primer
  misc_difference 21..23: note = n is a, c, g, t or u
  misc_difference 27..29: note = n is a, c, g, t or u
  modified_base 20: mod_base = OTHER; note = uracil
  modified_base 33: mod_base = OTHER; note = uracil
  modified_base 46..47: mod_base = OTHER; note = uracil
  modified_base 50: mod_base = OTHER; note = uracil
  source 1..53: mol_type = other DNA
tgacaaggcgtagtcacggtnnnactnnntgatcggcccaacaccttcatcat

SEQ ID NO: 1063 - DNA, 65 bp, synthetic construct
  misc_feature 1..65: note = Synthetic Primer
  misc_difference 21..23: note = n is a, c, g, t or u
  misc_difference 27..29: note = n is a, c, g, t or u
  modified_base 20: mod_base = OTHER; note = uracil
  modified_base 33: mod_base = OTHER; note = uracil
  modified_base 38: mod_base = OTHER; note = uracil
  modified_base 40: mod_base = OTHER; note = uracil
  modified_base 42..45: mod_base = OTHER; note = uracil
  modified_base 50: mod_base = OTHER; note = uracil
  modified_base 54..55: mod_base = OTHER; note = uracil
  modified_base 57: mod_base = OTHER; note = uracil
  modified_base 62: mod_base = OTHER; note = uracil
  source 1..65: mol_type = other DNA
tgacaaggcgtagtcacggtnnnactnnntgataaaatctgttttccaataaattctcagatcca

SEQ ID NO: 1064 - DNA, 57 bp, synthetic construct
  misc_feature 1..57: note = Synthetic Primer
  misc_difference 21..23: note = n is a, c, g, t or u
  misc_difference 27..29: note = n is a, c, g, t or u
  modified_base 20: mod_base = OTHER; note = uracil
  modified_base 33: mod_base = OTHER; note = uracil
  modified_base 35: mod_base = OTHER; note = uracil
  modified_base 37: mod_base = OTHER; note = uracil
  modified_base 40: mod_base = OTHER; note = uracil
  modified_base 43: mod_base = OTHER; note = uracil
  modified_base 55: mod_base = OTHER; note = uracil
  source 1..57: mol_type = other DNA
tgacaaggcgtagtcacggtnnnactnnntgatatctgatcctaaaacccagcctct

SEQ ID NO: 1065 - DNA, 58 bp, synthetic construct
  misc_feature 1..58: note = Synthetic Primer
  misc_difference 21..23: note = n is a, c, g, t or u
  misc_difference 27..29: note = n is a, c, g, t or u
  modified_base 20: mod_base = OTHER; note = uracil
  modified_base 33: mod_base = OTHER; note = uracil
  modified_base 44: mod_base = OTHER; note = uracil
  modified_base 47: mod_base = OTHER; note = uracil
  modified_base 53: mod_base = OTHER; note = uracil
  modified_base 55: mod_base = OTHER; note = uracil
  modified_base 57: mod_base = OTHER; note = uracil
  source 1..58: mol_type = other DNA
tgacaaggcgtagtcacggtnnnactnnntgatcacgggaaagtggtgaagatatgtg

SEQ ID NO: 1066 - DNA, 55 bp, synthetic construct
  misc_feature 1..55: note = Synthetic Primer
  misc_difference 21..23: note = n is a, c, g, t or u
  misc_difference 27..29: note = n is a, c, g, t or u
  modified_base 20: mod_base = OTHER; note = uracil
  modified_base 33: mod_base = OTHER; note = uracil
  modified_base 35: mod_base = OTHER; note = uracil
  modified_base 40..41: mod_base = OTHER; note = uracil
  modified_base 44: mod_base = OTHER; note = uracil
  modified_base 46: mod_base = OTHER; note = uracil
  modified_base 50: mod_base = OTHER; note = uracil
  modified_base 54: mod_base = OTHER; note = uracil
  source 1..55: mol_type = other DNA
tgacaaggcgtagtcacggtnnnactnnntgatctgaaattggtgtcggtgccta

SEQ ID NO: 1067 - DNA, 57 bp, synthetic construct
  misc_feature 1..57: note = Synthetic Primer
  misc_difference 21..23: note = n is a, c, g, t or u
  misc_difference 27..29: note = n is a, c, g, t or u
  modified_base 20: mod_base = OTHER; note = uracil
  modified_base 33: mod_base = OTHER; note = uracil
  modified_base 36: mod_base = OTHER; note = uracil
  modified_base 39..40: mod_base = OTHER; note = uracil
  modified_base 42..43: mod_base = OTHER; note = uracil
  modified_base 46..47: mod_base = OTHER; note = uracil
  modified_base 52: mod_base = OTHER; note = uracil
  source 1..57: mol_type = other DNA
tgacaaggcgtagtcacggtnnnactnnntgatgatcattgttccttcccctcagac

SEQ ID NO: 1068 - DNA, 53 bp, synthetic construct
  misc_feature 1..53: note = Synthetic Primer
  misc_difference 21..23: note = n is a, c, g, t or u
  misc_difference 27..29: note = n is a, c, g, t or u
  modified_base 20: mod_base = OTHER; note = uracil
  modified_base 33: mod_base = OTHER; note = uracil
  modified_base 37: mod_base = OTHER; note = uracil
  modified_base 44: mod_base = OTHER; note = uracil
  modified_base 46: mod_base = OTHER; note = uracil
  source 1..53: mol_type = other DNA
tgacaaggcgtagtcacggtnnnactnnntgatgagtccacagtctggaagcg

SEQ ID NO: 1069 - DNA, 58 bp, synthetic construct
  misc_feature 1..58: note = Synthetic Primer
  misc_difference 21..23: note = n is a, c, g, t or u
  misc_difference 27..29: note = n is a, c, g, t or u
  modified_base 20: mod_base = OTHER; note = uracil
  modified_base 33..34: mod_base = OTHER; note = uracil
  modified_base 36: mod_base = OTHER; note = uracil
  modified_base 44..45: mod_base = OTHER; note = uracil
  modified_base 48: mod_base = OTHER; note = uracil
  modified_base 55..56: mod_base = OTHER; note = uracil
  source 1..58: mol_type = other DNA
tgacaaggcgtagtcacggtnnnactnnntgattatcacagaattcctccaggcttct

SEQ ID NO: 1070 - DNA, 59 bp, synthetic construct
  misc_feature 1..59: note = Synthetic Primer
  misc_difference 21..23: note = n is a, c, g, t or u
  misc_difference 27..29: note = n is a, c, g, t or u
  modified_base 20: mod_base = OTHER; note = uracil
  modified_base 33: mod_base = OTHER; note = uracil
  modified_base 35: mod_base = OTHER; note = uracil
  modified_base 37: mod_base = OTHER; note = uracil
  modified_base 40..41: mod_base = OTHER; note = uracil
  modified_base 45: mod_base = OTHER; note = uracil
  modified_base 47..48: mod_base = OTHER; note = uracil
  modified_base 50: mod_base = OTHER; note = uracil
  source 1..59: mol_type = other DNA
tgacaaggcgtagtcacggtnnnactnnntgatatctacttccatcttgtcaggaggac

SEQ ID NO: 1071 - DNA, 59 bp, synthetic construct
  misc_feature 1..59: note = Synthetic Primer
  misc_difference 21..23: note = n is a, c, g, t or u
  misc_difference 27..29: note = n is a, c, g, t or u
  modified_base 20: mod_base = OTHER; note = uracil
  modified_base 33: mod_base = OTHER; note = uracil
  modified_base 40: mod_base = OTHER; note = uracil
  modified_base 42: mod_base = OTHER; note = uracil
  modified_base 49..51: mod_base = OTHER; note = uracil
  modified_base 58: mod_base = OTHER; note = uracil
  source 1..59: mol_type = other DNA
tgacaaggcgtagtcacggtnnnactnnntgatcccaaatatccccagtttccagaatc

SEQ ID NO: 1072 - DNA, 53 bp, synthetic construct
  misc_feature 1..53: note = Synthetic Primer
  misc_difference 21..23: note = n is a, c, g, t or u
  misc_difference 27..29: note = n is a, c, g, t or u
  modified_base 20: mod_base = OTHER; note = uracil
  modified_base 33: mod_base = OTHER; note = uracil
  modified_base 36: mod_base = OTHER; note = uracil
  modified_base 39: mod_base = OTHER; note = uracil
  modified_base 45: mod_base = OTHER; note = uracil
  modified_base 49: mod_base = OTHER; note = uracil
  source 1..53: mol_type = other DNA
tgacaaggcgtagtcacggtnnnactnnntgatcatcgtagacctgggtccct

SEQ ID NO: 1073 - DNA, 54 bp, synthetic construct
  misc_feature 1..54: note = Synthetic Primer
  misc_difference 21..23: note = n is a, c, g, t or u
  misc_difference 27..29: note = n is a, c, g, t or u
  modified_base 20: mod_base = OTHER; note = uracil
  modified_base 33: mod_base = OTHER; note = uracil
  modified_base 35: mod_base = OTHER; note = uracil
  modified_base 40: mod_base = OTHER; note = uracil
  modified_base 49: mod_base = OTHER; note = uracil
  modified_base 51: mod_base = OTHER; note = uracil
  source 1..54: mol_type = other DNA
tgacaaggcgtagtcacggtnnnactnnntgatgtcccgtgagcacaatctcaa

SEQ ID NO: 1074 - DNA, 54 bp, synthetic construct
  misc_feature 1..54: note = Synthetic Primer
  misc_difference 21..23: note = n is a, c, g, t or u
  misc_difference 27..29: note = n is a, c, g, t or u
  modified_base 20: mod_base = OTHER; note = uracil
  modified_base 33: mod_base = OTHER; note = uracil
  modified_base 37..38: mod_base = OTHER; note = uracil
  modified_base 40: mod_base = OTHER; note = uracil
  modified_base 42: mod_base = OTHER; note = uracil
  modified_base 44: mod_base = OTHER; note = uracil
  modified_base 46: mod_base = OTHER; note = uracil
  modified_base 50..51: mod_base = OTHER; note = uracil
  source 1..54: mol_type = other DNA
tgacaaggcgtagtcacggtnnnactnnntgatcccttctctgtctcccttgga

SEQ ID NO: 1075 - DNA, 57 bp, synthetic construct
  misc_feature 1..57: note = Synthetic Primer
  misc_difference 21..23: note = n is a, c, g, t or u
  misc_difference 27..29: note = n is a, c, g, t or u
  modified_base 20: mod_base = OTHER; note = uracil
  modified_base 33..34: mod_base = OTHER; note = uracil
  modified_base 41: mod_base = OTHER; note = uracil
  modified_base 44: mod_base = OTHER; note = uracil
  modified_base 50: mod_base = OTHER; note = uracil
  modified_base 54: mod_base = OTHER; note = uracil
  source 1..57: mol_type = other DNA
tgacaaggcgtagtcacggtnnnactnnntgattaaggcctgctgaaaatgactgaa

SEQ ID NO: 1076 - DNA, 59 bp, synthetic construct
  misc_feature 1..59: note = Synthetic Primer
  misc_difference 21..23: note = n is a, c, g, t or u
  misc_difference 27..29: note = n is a, c, g, t or u
  modified_base 20: mod_base = OTHER; note = uracil
  modified_base 33: mod_base = OTHER; note = uracil
  modified_base 41: mod_base = OTHER; note = uracil
  modified_base 43: mod_base = OTHER; note = uracil
  modified_base 45: mod_base = OTHER; note = uracil
  modified_base 47..48: mod_base = OTHER; note = uracil
  modified_base 52: mod_base = OTHER; note = uracil
  modified_base 54..55: mod_base = OTHER; note = uracil
  modified_base 57: mod_base = OTHER; note = uracil
  source 1..59: mol_type = other DNA
tgacaaggcgtagtcacggtnnnactnnntgatagaaacctgtctcttggatattctcg

SEQ ID NO: 1077 - DNA, 58 bp, synthetic construct
  misc_feature 1..58: note = Synthetic Primer
  misc_difference 21..23: note = n is a, c, g, t or u
  misc_difference 27..29: note = n is a, c, g, t or u
  modified_base 20: mod_base = OTHER; note = uracil
  modified_base 33: mod_base = OTHER; note = uracil
  modified_base 35: mod_base = OTHER; note = uracil
  modified_base 42..43: mod_base = OTHER; note = uracil
  modified_base 53..54: mod_base = OTHER; note = uracil
  modified_base 56: mod_base = OTHER; note = uracil
  source 1..58: mol_type = other DNA
tgacaaggcgtagtcacggtnnnactnnntgatctcaggacttagcaagaagttatgg

SEQ ID NO: 1078 - DNA, 63 bp, synthetic construct
  misc_feature 1..63: note = Synthetic Primer
  misc_difference 21..23: note = n is a, c, g, t or u
  misc_difference 27..29: note = n is a, c, g, t or u
  modified_base 20: mod_base = OTHER; note = uracil
  modified_base 33..34: mod_base = OTHER; note = uracil
  modified_base 48..49: mod_base = OTHER; note = uracil
  modified_base 57..58: mod_base = OTHER; note = uracil
  source 1..63: mol_type = other DNA
tgacaaggcgtagtcacggtnnnactnnntgattcccagagaacaaattaaaagagttaagga

SEQ ID NO: 1079 - DNA, 55 bp, synthetic construct
  misc_feature 1..55: note = Synthetic Primer
  misc_difference 21..23: note = n is a, c, g, t or u
  misc_difference 27..29: note = n is a, c, g, t or u
  modified_base 20: mod_base = OTHER; note = uracil
  modified_base 33: mod_base = OTHER; note = uracil
  modified_base 42: mod_base = OTHER; note = uracil
  modified_base 46: mod_base = OTHER; note = uracil
  modified_base 48: mod_base = OTHER; note = uracil
  modified_base 51..53: mod_base = OTHER; note = uracil
  source 1..55: mol_type = other DNA
tgacaaggcgtagtcacggtnnnactnnntgatgaagggagtcactctggtttgg

SEQ ID NO: 1080 - DNA, 50 bp, synthetic construct
  misc_feature 1..50: note = Synthetic Primer
  misc_difference 21..23: note = n is a, c, g, t or u
  misc_difference 27..29: note = n is a, c, g, t or u
  modified_base 20: mod_base = OTHER; note = uracil
  modified_base 33: mod_base = OTHER; note = uracil
  modified_base 37: mod_base = OTHER; note = uracil
  modified_base 43: mod_base = OTHER; note = uracil
  modified_base 48: mod_base = OTHER; note = uracil
  source 1..50: mol_type = other DNA
tgacaaggcgtagtcacggtnnnactnnntgatcaatgccgatggcctcc

SEQ ID NO: 1081 - DNA, 56 bp, synthetic construct
  misc_feature 1..56: note = Synthetic Primer
  misc_difference 21..23: note = n is a, c, g, t or u
  misc_difference 27..29: note = n is a, c, g, t or u
  modified_base 20: mod_base = OTHER; note = uracil
  modified_base 33: mod_base = OTHER; note = uracil
  modified_base 35: mod_base = OTHER; note = uracil
  modified_base 43: mod_base = OTHER; note = uracil
  modified_base 45: mod_base = OTHER; note = uracil
  modified_base 50: mod_base = OTHER; note = uracil
  modified_base 53: mod_base = OTHER; note = uracil
  source 1..56: mol_type = other DNA
tgacaaggcgtagtcacggtnnnactnnntgatatgacggaatataagctggtggt

SEQ ID NO: 1082 - DNA, 52 bp, synthetic construct
  misc_feature 1..52: note = Synthetic Primer
  misc_difference 21..23: note = n is a, c, g, t or u
  misc_difference 27..29: note = n is a, c, g, t or u
  modified_base 20: mod_base = OTHER; note = uracil
  modified_base 33: mod_base = OTHER; note = uracil
  modified_base 35..36: mod_base = OTHER; note = uracil
  modified_base 39: mod_base = OTHER; note = uracil
  source 1..52: mol_type = other DNA
tgacaaggcgtagtcacggtnnnactnnntgatattcctaccggaagcaggt

SEQ ID NO: 1083 - DNA, 58 bp, synthetic construct
  misc_feature 1..58: note = Synthetic Primer
  misc_difference 21..23: note = n is a, c, g, t or u
  misc_difference 27..29: note = n is a, c, g, t or u
  modified_base 20: mod_base = OTHER; note = uracil
  modified_base 33: mod_base = OTHER; note = uracil
  modified_base 39..40: mod_base = OTHER; note = uracil
  modified_base 42: mod_base = OTHER; note = uracil
  modified_base 46: mod_base = OTHER; note = uracil
  modified_base 50..52: mod_base = OTHER; note = uracil
  modified_base 56..57: mod_base = OTHER; note = uracil
  source 1..58: mol_type = other DNA
tgacaaggcgtagtcacggtnnnactnnntgatcccagttgtgggtacctttagattc

SEQ ID NO: 1084 - DNA, 63 bp, synthetic construct
  misc_feature 1..63: note = Synthetic Primer
  misc_difference 21..23: note = n is a, c, g, t or u
  misc_difference 27..29: note = n is a, c, g, t or u
  modified_base 20: mod_base = OTHER; note = uracil
  modified_base 33..34: mod_base = OTHER; note = uracil
  modified_base 40: mod_base = OTHER; note = uracil
  modified_base 42: mod_base = OTHER; note = uracil
  modified_base 51: mod_base = OTHER; note = uracil
  modified_base 55: mod_base = OTHER; note = uracil
  modified_base 57: mod_base = OTHER; note = uracil
  modified_base 59..61: mod_base = OTHER; note = uracil
  source 1..63: mol_type = other DNA
tgacaaggcgtagtcacggtnnnactnnntgattccgaatatagagaacctcaatctctttgt

SEQ ID NO: 1085 - DNA, 59 bp, synthetic construct
  misc_feature 1..59: note = Synthetic Primer
  misc_difference 21..23: note = n is a, c, g, t or u
  misc_difference 27..29: note = n is a, c, g, t or u
  modified_base 20: mod_base = OTHER; note = uracil
  modified_base 33: mod_base = OTHER; note = uracil
  modified_base 37: mod_base = OTHER; note = uracil
  modified_base 43: mod_base = OTHER; note = uracil
  modified_base 46: mod_base = OTHER; note = uracil
  modified_base 52: mod_base = OTHER; note = uracil
  modified_base 55..56: mod_base = OTHER; note = uracil
  source 1..59: mol_type = other DNA
tgacaaggcgtagtcacggtnnnactnnntgatagatggagatgatgaagatgattggg

SEQ ID NO: 1086 - DNA, 59 bp, synthetic construct
  misc_feature 1..59: note = Synthetic Primer
  misc_difference 21..23: note = n is a, c, g, t or u
  misc_difference 27..29: note = n is a, c, g, t or u
  modified_base 20: mod_base = OTHER; note = uracil
  modified_base 33..34: mod_base = OTHER; note = uracil
  modified_base 36: mod_base = OTHER; note = uracil
  modified_base 38..40: mod_base = OTHER; note = uracil
  modified_base 48..49: mod_base = OTHER; note = uracil
  modified_base 51: mod_base = OTHER; note = uracil
  modified_base 53..54: mod_base = OTHER; note = uracil
  modified_base 56..57: mod_base = OTHER; note = uracil
  source 1..59: mol_type = other DNA
tgacaaggcgtagtcacggtnnnactnnntgattctctttagggagcttctcttcttcc

SEQ ID NO: 1087 - DNA, 55 bp, synthetic construct
  misc_feature 1..55: note = Synthetic Primer
  misc_difference 21..23: note = n is a, c, g, t or u
  misc_difference 27..29: note = n is a, c, g, t or u
  modified_base 20: mod_base = OTHER; note = uracil
  modified_base 33: mod_base = OTHER; note = uracil
  modified_base 37..38: mod_base = OTHER; note = uracil
  modified_base 41: mod_base = OTHER; note = uracil
  modified_base 43: mod_base = OTHER; note = uracil
  modified_base 46: mod_base = OTHER; note = uracil
  modified_base 52: mod_base = OTHER; note = uracil
  source 1..55: mol_type = other DNA
tgacaaggcgtagtcacggtnnnactnnntgatgacttggtgtcatgcacctacc

SEQ ID NO: 1088 - DNA, 61 bp, synthetic construct
  misc_feature 1..61: note = Synthetic Primer
  misc_difference 21..23: note = n is a, c, g, t or u
  misc_difference 27..29: note = n is a, c, g, t or u
  modified_base 20: mod_base = OTHER; note = uracil
  modified_base 33: mod_base = OTHER; note = uracil
  modified_base 41: mod_base = OTHER; note = uracil
  modified_base 43..46: mod_base = OTHER; note = uracil
  modified_base 49: mod_base = OTHER; note = uracil
  source 1..61: mol_type = other DNA
tgacaaggcgtagtcacggtnnnactnnntgatccagaaatgttttggtaacagaaaacaa

SEQ ID NO: 1089 - DNA, 59 bp, synthetic construct
  misc_feature 1..59: note = Synthetic Primer
  misc_difference 21..23: note = n is a, c, g, t or u
  misc_difference 27..29: note = n is a, c, g, t or u
  modified_base 20: mod_base = OTHER; note = uracil
  modified_base 33: mod_base = OTHER; note = uracil
  modified_base 50..51: mod_base = OTHER; note = uracil
  modified_base 54: mod_base = OTHER; note = uracil
  source 1..59: mol_type = other DNA
tgacaaggcgtagtcacggtnnnactnnntgatgccagagaaaagagagttactcacac

SEQ ID NO: 1090 - DNA, 55 bp, synthetic construct
  misc_feature 1..55: note = Synthetic Primer
  misc_difference 21..23: note = n is a, c, g, t or u
  misc_difference 27..29: note = n is a, c, g, t or u
  modified_base 20: mod_base = OTHER; note = uracil
  modified_base 33..34: mod_base = OTHER; note = uracil
  modified_base 39: mod_base = OTHER; note = uracil
  modified_base 42: mod_base = OTHER; note = uracil
  modified_base 47: mod_base = OTHER; note = uracil
  modified_base 49: mod_base = OTHER; note = uracil
  modified_base 53..54: mod_base = OTHER; note = uracil
  source 1..55: mol_type = other DNA
tgacaaggcgtagtcacggtnnnactnnntgattgaactgctagcctctggattt

SEQ ID NO: 1091 - DNA, 57 bp, synthetic construct
  misc_feature 1..57: note = Synthetic Primer
  misc_difference 21..23: note = n is a, c, g, t or u
  misc_difference 27..29: note = n is a, c, g, t or u
  modified_base 20: mod_base = OTHER; note = uracil
  modified_base 33: mod_base = OTHER; note = uracil
  modified_base 36: mod_base = OTHER; note = uracil
  modified_base 42: mod_base = OTHER; note = uracil
  modified_base 45: mod_base = OTHER; note = uracil
  modified_base 47: mod_base = OTHER; note = uracil
  modified_base 49: mod_base = OTHER; note = uracil
  modified_base 52: mod_base = OTHER; note = uracil
  source 1..57: mol_type = other DNA
tgacaaggcgtagtcacggtnnnactnnntgatagtgccactggtctataatccaga

SEQ ID NO: 1092 - DNA, 57 bp, synthetic construct
  misc_feature 1..57: note = Synthetic Primer
  misc_difference 21..23: note = n is a, c, g, t or u
  misc_difference 27..29: note = n is a, c, g, t or u
  modified_base 20: mod_base = OTHER; note = uracil
  modified_base 33: mod_base = OTHER; note = uracil
  modified_base 35: mod_base = OTHER; note = uracil
  modified_base 39..41: mod_base = OTHER; note = uracil
  modified_base 47..49: mod_base = OTHER; note = uracil
  source 1..57: mol_type = other DNA
tgacaaggcgtagtcacggtnnnactnnntgatgtgcctttaaaaatttgccccgat

SEQ ID NO: 1093 - DNA, 58 bp, synthetic construct
  misc_feature 1..58: note = Synthetic Primer
  misc_difference 21..23: note = n is a, c, g, t or u
  misc_difference 27..29: note = n is a, c, g, t or u
  modified_base 20: mod_base = OTHER; note = uracil
  modified_base 33: mod_base = OTHER; note = uracil
  modified_base 36..39: mod_base = OTHER; note = uracil
  modified_base 43: mod_base = OTHER; note = uracil
  modified_base 45..48: mod_base = OTHER; note = uracil
  modified_base 50: mod_base = OTHER; note = uracil
  modified_base 52: mod_base = OTHER; note = uracil
  modified_base 54..55: mod_base = OTHER; note = uracil
  source 1..58: mol_type = other DNA
tgacaaggcgtagtcacggtnnnactnnntgatgcttttccatcttttctgtgttggt

SEQ ID NO: 1094 - DNA, 56 bp, synthetic construct
  misc_feature 1..56: note = Synthetic Primer
  misc_difference 21..23: note = n is a, c, g, t or u
  misc_difference 27..29: note = n is a, c, g, t or u
  modified_base 20: mod_base = OTHER; note = uracil
  modified_base 33: mod_base = OTHER; note = uracil
  modified_base 35: mod_base = OTHER; note = uracil
  modified_base 38: mod_base = OTHER; note = uracil
  modified_base 48: mod_base = OTHER; note = uracil
  modified_base 52: mod_base = OTHER; note = uracil
  modified_base 55: mod_base = OTHER; note = uracil
  source 1..56: mol_type = other DNA
tgacaaggcgtagtcacggtnnnactnnntgatctgataaagcaccctccatcgtt

SEQ ID NO: 1095 - DNA, 54 bp, synthetic construct
  misc_feature 1..54: note = Synthetic Primer
  misc_difference 21..23: note = n is a, c, g, t or u
  misc_difference 27..29: note = n is a, c, g, t or u
  modified_base 20: mod_base = OTHER; note = uracil
  modified_base 33: mod_base = OTHER; note = uracil
  modified_base 35..36: mod_base = OTHER; note = uracil
  modified_base 46: mod_base = OTHER; note = uracil
  modified_base 50: mod_base = OTHER; note = uracil
  modified_base 52: mod_base = OTHER; note = uracil
  source 1..54: mol_type = other DNA
tgacaaggcgtagtcacggtnnnactnnntgatattcggacacactggctgtac

SEQ ID NO: 1096 - DNA, 58 bp, synthetic construct
  misc_feature 1..58: note = Synthetic Primer
  misc_difference 21..23: note = n is a, c, g, t or u
  misc_difference 27..29: note = n is a, c, g, t or u
  modified_base 20: mod_base = OTHER; note = uracil
  modified_base 33: mod_base = OTHER; note = uracil
  modified_base 35: mod_base = OTHER; note = uracil
  modified_base 37: mod_base = OTHER; note = uracil
  modified_base 40..41: mod_base = OTHER; note = uracil
  modified_base 44: mod_base = OTHER; note = uracil
  modified_base 47: mod_base = OTHER; note = uracil
  modified_base 49: mod_base = OTHER; note = uracil
  modified_base 52..54: mod_base = OTHER; note = uracil
  source 1..58: mol_type = other DNA
tgacaaggcgtagtcacggtnnnactnnntgatctctccttcctcctgtagtttcaga

SEQ ID NO: 1097 - DNA, 63 bp, synthetic construct
  misc_feature 1..63: note = Synthetic Primer
  misc_difference 21..23: note = n is a, c, g, t or u
  misc_difference 27..29: note = n is a, c, g, t or u
  modified_base 20: mod_base = OTHER; note = uracil
  modified_base 33: mod_base = OTHER; note = uracil
  modified_base 40: mod_base = OTHER; note = uracil
  modified_base 48..49: mod_base = OTHER; note = uracil
  modified_base 51..52: mod_base = OTHER; note = uracil
  modified_base 56..57: mod_base = OTHER; note = uracil
  modified_base 60: mod_base = OTHER; note = uracil
  source 1..63: mol_type = other DNA
tgacaaggcgtagtcacggtnnnactnnntgatagaaaatcaaagcattcttaccttactaca

SEQ ID NO: 1098 - DNA, 53 bp, synthetic construct
  misc_feature 1..53: note = Synthetic Primer
  misc_difference 21..23: note = n is a, c, g, t or u
  misc_difference 27..29: note = n is a, c, g, t or u
  modified_base 20: mod_base = OTHER; note = uracil
  modified_base 33: mod_base = OTHER; note = uracil
  modified_base 35: mod_base = OTHER; note = uracil
  modified_base 38..40: mod_base = OTHER; note = uracil
  modified_base 42: mod_base = OTHER; note = uracil
  modified_base 45: mod_base = OTHER; note = uracil
  source 1..53: mol_type = other DNA
tgacaaggcgtagtcacggtnnnactnnntgatatcatttctgctggcgcaca

SEQ ID NO: 1099 - DNA, 57 bp, synthetic construct
  misc_feature 1..57: note = Synthetic Primer
  misc_difference 21..23: note = n is a, c, g, t or u
  misc_difference 27..29: note = n is a, c, g, t or u
  modified_base 20: mod_base = OTHER; note = uracil
  modified_base 33: mod_base = OTHER; note = uracil
  modified_base 44: mod_base = OTHER; note = uracil
  modified_base 48: mod_base = OTHER; note = uracil
  modified_base 50: mod_base = OTHER; note = uracil
  source 1..57: mol_type = other DNA
tgacaaggcgtagtcacggtnnnactnnntgatgaaagagaagtgcatgtgcaagac

SEQ ID NO: 1100 - DNA, 59 bp, synthetic construct
  misc_feature 1..59: note = Synthetic Primer
  misc_difference 21..23: note = n is a, c, g, t or u
  misc_difference 27..29: note = n is a, c, g, t or u
  modified_base 20: mod_base = OTHER; note = uracil
  modified_base 33: mod_base = OTHER; note = uracil
  modified_base 36: mod_base = OTHER; note = uracil
  modified_base 48: mod_base = OTHER; note = uracil
  modified_base 57: mod_base = OTHER; note = uracil
  source 1..59: mol_type = other DNA
tgacaaggcgtagtcacggtnnnactnnntgatcataggcaagaagatggaacagatga

SEQ ID NO: 1101 - DNA, 50 bp, synthetic construct
  misc_feature 1..50: note = Synthetic Primer
  misc_difference 21..23: note = n is a, c, g, t or u
  misc_difference 27..29: note = n is a, c, g, t or u
  modified_base 20: mod_base = OTHER; note = uracil
  modified_base 33: mod_base = OTHER; note = uracil
  modified_base 38: mod_base = OTHER; note = uracil
  modified_base 44..45: mod_base = OTHER; note = uracil
  source 1..50: mol_type = other DNA
tgacaaggcgtagtcacggtnnnactnnntgatgcagtccggcttggagg

SEQ ID NO: 1102 - DNA, 57 bp, synthetic construct
  misc_feature 1..57: note = Synthetic Primer
  misc_difference 21..23: note = n is a, c, g, t or u
  misc_difference 27..29: note = n is a, c, g, t or u
  modified_base 20: mod_base = OTHER; note = uracil
  modified_base 33: mod_base = OTHER; note = uracil
  modified_base 39: mod_base = OTHER; note = uracil
  modified_base 43..44: mod_base = OTHER; note = uracil
  modified_base 47: mod_base = OTHER; note = uracil
  modified_base 52: mod_base = OTHER; note = uracil
  modified_base 55..56: mod_base = OTHER; note = uracil
  source 1..57: mol_type = other DNA
tgacaaggcgtagtcacggtnnnactnnntgatggccatgaattcgtcagctagttt

SEQ ID NO: 1103 - DNA, 55 bp, synthetic construct
  misc_feature 1..55: note = Synthetic Primer
  misc_difference 21..23: note = n is a, c, g, t or u
  misc_difference 27..29: note = n is a, c, g, t or u
  modified_base 20: mod_base = OTHER; note = uracil
  modified_base 33: mod_base = OTHER; note = uracil
  modified_base 36..37: mod_base = OTHER; note = uracil
  modified_base 40: mod_base = OTHER; note = uracil
  modified_base 43..44: mod_base = OTHER; note = uracil
  modified_base 50..51: mod_base = OTHER; note = uracil
  modified_base 53: mod_base = OTHER; note = uracil
  source 1..55: mol_type = other DNA
tgacaaggcgtagtcacggtnnnactnnntgatccttcctggttggccgttatat

SEQ ID NO: 1104 - DNA, 58 bp, synthetic construct
  misc_feature 1..58: note = Synthetic Primer
  misc_difference 21..23: note = n is a, c, g, t or u
  misc_difference 27..29: note = n is a, c, g, t or u
  modified_base 20: mod_base = OTHER; note = uracil
  modified_base 33: mod_base = OTHER; note = uracil
  modified_base 44..45: mod_base = OTHER; note = uracil
  modified_base 49..50: mod_base = OTHER; note = uracil
  modified_base 55: mod_base = OTHER; note = uracil
  source 1..58: mol_type = other DNA
tgacaaggcgtagtcacggtnnnactnnntgatcaaaaagggattcaattgccatcca

SEQ ID NO: 1105 - DNA, 55 bp, synthetic construct
  misc_feature 1..55: note = Synthetic Primer
  misc_difference 21..23: note = n is a, c, g, t or u
  misc_difference 27..29: note = n is a, c, g, t or u
  modified_base 20: mod_base = OTHER; note = uracil
  modified_base 33..34: mod_base = OTHER; note = uracil
  modified_base 37: mod_base = OTHER; note = uracil
  modified_base 44: mod_base = OTHER; note = uracil
  modified_base 49: mod_base = OTHER; note = uracil
  modified_base 53: mod_base = OTHER; note = uracil
  source 1..55: mol_type = other DNA
tgacaaggcgtagtcacggtnnnactnnntgattactccacagtgagctcgatcc

SEQ ID NO: 1106 - DNA, 58 bp, synthetic construct
  misc_feature 1..58: note = Synthetic Primer
  misc_difference 21..23: note = n is a, c, g, t or u
  misc_difference 27..29: note = n is a, c, g, t or u
  modified_base 20: mod_base = OTHER; note = uracil
  modified_base 33: mod_base = OTHER; note = uracil
  modified_base 37..38: mod_base = OTHER; note = uracil
  modified_base 51..55: mod_base = OTHER; note = uracil
  source 1..58: mol_type = other DNA
tgacaaggcgtagtcacggtnnnactnnntgatgagttgagagaaacacatttttggg

SEQ ID NO: 1107 - DNA, 50 bp, synthetic construct
  misc_feature 1..50: note = Synthetic Primer
  misc_difference 21..23: note = n is a, c, g, t or u
  misc_difference 27..29: note = n is a, c, g, t or u
  modified_base 20: mod_base = OTHER; note = uracil
  modified_base 33..36: mod_base = OTHER; note = uracil
  modified_base 38..39: mod_base = OTHER; note = uracil
  source 1..50: mol_type = other DNA
tgacaaggcgtagtcacggtnnnactnnntgattttgttggcgggcaacc

SEQ ID NO: 1108 - DNA, 55 bp, synthetic construct
  misc_feature 1..55: note = Synthetic Primer
  misc_difference 21..23: note = n is a, c, g, t or u
  misc_difference 27..29: note = n is a, c, g, t or u
  modified_base 20: mod_base = OTHER; note = uracil
  modified_base 33: mod_base = OTHER; note = uracil
  modified_base 39..40: mod_base = OTHER; note = uracil
  modified_base 43: mod_base = OTHER; note = uracil
  modified_base 47: mod_base = OTHER; note = uracil
  modified_base 52: mod_base = OTHER; note = uracil
  source 1..55: mol_type = other DNA
tgacaaggcgtagtcacggtnnnactnnntgatcagagttcatggatgcactgga

SEQ ID NO: 1109 - DNA, 52 bp, synthetic construct
  misc_feature 1..52: note = Synthetic Primer
  misc_difference 21..23: note = n is a, c, g, t or u
  misc_difference 27..29: note = n is a, c, g, t or u
  modified_base 20: mod_base = OTHER; note = uracil
  modified_base 33: mod_base = OTHER; note = uracil
  modified_base 39: mod_base = OTHER; note = uracil
  modified_base 43: mod_base = OTHER; note = uracil
  modified_base 46: mod_base = OTHER; note = uracil
  modified_base 48..49: mod_base = OTHER; note = uracil
  source 1..52: mol_type = other DNA
tgacaaggcgtagtcacggtnnnactnnntgatgcacctggctcctcttcac

SEQ ID NO: 1110 - DNA, 50 bp, synthetic construct
  misc_feature 1..50: note = Synthetic Primer
  misc_difference 21..23: note = n is a, c, g, t or u
  misc_difference 27..29: note = n is a, c, g, t or u
  modified_base 20: mod_base = OTHER; note = uracil
  modified_base 33: mod_base = OTHER; note = uracil
  modified_base 37: mod_base = OTHER; note = uracil
  modified_base 39: mod_base = OTHER; note = uracil
  source 1..50: mol_type = other DNA
tgacaaggcgtagtcacggtnnnactnnntgatggctctcgcggaggaag

SEQ ID NO: 1111 - DNA, 51 bp, synthetic construct
  misc_feature 1..51: note = Synthetic Primer
  misc_difference 21..23: note = n is a, c, g, t or u
  misc_difference 27..29: note = n is a, c, g, t or u
  modified_base 20: mod_base = OTHER; note = uracil
  modified_base 33: mod_base = OTHER; note = uracil
  modified_base 35: mod_base = OTHER; note = uracil
  modified_base 38..39: mod_base = OTHER; note = uracil
  modified_base 43: mod_base = OTHER; note = uracil
  modified_base 47: mod_base = OTHER; note = uracil
  source 1..51: mol_type = other DNA
tgacaaggcgtagtcacggtnnnactnnntgatctagttgcatgggtggcg

SEQ ID NO: 1112 - DNA, 54 bp, synthetic construct
  misc_feature 1..54: note = Synthetic Primer
  misc_difference 21..23: note = n is a, c, g, t or u
  misc_difference 27..29: note = n is a, c, g, t or u
  modified_base 20: mod_base = OTHER; note = uracil
  modified_base 33: mod_base = OTHER; note = uracil
  modified_base 36..37: mod_base = OTHER; note = uracil
  modified_base 42: mod_base = OTHER; note = uracil
  modified_base 44: mod_base = OTHER; note = uracil
  source 1..54: mol_type = other DNA
tgacaaggcgtagtcacggtnnnactnnntgatcgttgaactctgacagcaggt

SEQ ID NO: 1113 - DNA, 53 bp, synthetic construct
  misc_feature 1..53: note = Synthetic Primer
  misc_difference 21..23: note = n is a, c, g, t or u
  misc_difference 27..29: note = n is a, c, g, t or u
  modified_base 20: mod_base = OTHER; note = uracil
  modified_base 33: mod_base = OTHER; note = uracil
  modified_base 38: mod_base = OTHER; note = uracil
  modified_base 43..44: mod_base = OTHER; note = uracil
  modified_base 49: mod_base = OTHER; note = uracil
  modified_base 52: mod_base = OTHER; note = uracil
  source 1..53: mol_type = other DNA
tgacaaggcgtagtcacggtnnnactnnntgatcagctggccttaccatcctg

SEQ ID NO: 1114 - DNA, 58 bp, synthetic construct
  misc_feature 1..58: note = Synthetic Primer
  misc_difference 21..23: note = n is a, c, g, t or u
  misc_difference 27..29: note = n is a, c, g, t or u
  modified_base 20: mod_base = OTHER; note = uracil
  modified_base 33: mod_base = OTHER; note = uracil
  modified_base 37..38: mod_base = OTHER; note = uracil
  modified_base 41..43: mod_base = OTHER; note = uracil
  modified_base 47..48: mod_base = OTHER; note = uracil
  modified_base 50: mod_base = OTHER; note = uracil
  source 1..58: mol_type = other DNA
tgacaaggcgtagtcacggtnnnactnnntgatcacttaatttggattgtggcacaga

SEQ ID NO: 1115 - DNA, 58 bp, synthetic construct
  misc_feature 1..58: note = Synthetic Primer
  misc_difference 21..23: note = n is a, c, g, t or u
  misc_difference 27..29: note = n is a, c, g, t or u
  modified_base 20: mod_base = OTHER; note = uracil
  modified_base 33..34: mod_base = OTHER; note = uracil
  modified_base 38: mod_base = OTHER; note = uracil
  modified_base 41: mod_base = OTHER; note = uracil
  modified_base 50: mod_base = OTHER; note = uracil
  source 1..58: mol_type = other DNA
tgacaaggcgtagtcacggtnnnactnnntgattacatcatgagaggaatgcaggaat

SEQ ID NO: 1116 - DNA, 59 bp, synthetic construct
  misc_feature 1..59: note = Synthetic Primer
  misc_difference 21..23: note = n is a, c, g, t or u
  misc_difference 27..29: note = n is a, c, g, t or u
  modified_base 20: mod_base = OTHER; note = uracil
  modified_base 33: mod_base = OTHER; note = uracil
  modified_base 40: mod_base = OTHER; note = uracil
  modified_base 48: mod_base = OTHER; note = uracil
  modified_base 50: mod_base = OTHER; note = uracil
  modified_base 54: mod_base = OTHER; note = uracil
  source 1..59: mol_type = other DNA
tgacaaggcgtagtcacggtnnnactnnntgatcaaagatgcagagctctgagtagaac

SEQ ID NO: 1117 - DNA, 51 bp, synthetic construct
  misc_feature 1..51: note = Synthetic Primer
  misc_difference 21..23: note = n is a, c, g, t or u
  misc_difference 27..29: note = n is a, c, g, t or u
  modified_base 20: mod_base = OTHER; note = uracil
  modified_base 33: mod_base = OTHER; note = uracil
  modified_base 39: mod_base = OTHER; note = uracil
  modified_base 42: mod_base = OTHER; note = uracil
  modified_base 45: mod_base = OTHER; note = uracil
  modified_base 48: mod_base = OTHER; note = uracil
  source 1..51: mol_type = other DNA
tgacaaggcgtagtcacggtnnnactnnntgatggaggtggtggtggtccc

SEQ ID NO: 1118 - DNA, 58 bp, synthetic construct
  misc_feature 1..58: note = Synthetic Primer
  misc_difference 21..23: note = n is a, c, g, t or u
  misc_difference 27..29: note = n is a, c, g, t or u
  modified_base 20: mod_base = OTHER; note = uracil
  modified_base 33: mod_base = OTHER; note = uracil
  modified_base 49..52: mod_base = OTHER; note = uracil
  modified_base 57: mod_base = OTHER; note = uracil
  source 1..58: mol_type = other DNA
tgacaaggcgtagtcacggtnnnactnnntgatcaccccagcaaagcattttaagatc

SEQ ID NO: 1119 - DNA, 58 bp, synthetic construct
  misc_feature 1..58: note = Synthetic Primer
  misc_difference 21..23: note = n is a, c, g, t or u
  misc_difference 27..29: note = n is a, c, g, t or u
  modified_base 20: mod_base = OTHER; note = uracil
  modified_base 33: mod_base = OTHER; note = uracil
  modified_base 37: mod_base = OTHER; note = uracil
  modified_base 39: mod_base = OTHER; note = uracil
  modified_base 41: mod_base = OTHER; note = uracil
  modified_base 48: mod_base = OTHER; note = uracil
  modified_base 50..51: mod_base = OTHER; note = uracil
  modified_base 57: mod_base = OTHER; note = uracil
  source 1..58: mol_type = other DNA
tgacaaggcgtagtcacggtnnnactnnntgatacatgtatgccagctgttagagatt

SEQ ID NO: 1120 - DNA, 59 bp, synthetic construct
  misc_feature 1..59: note = Synthetic Primer
  misc_difference 21..23: note = n is a, c, g, t or u
  misc_difference 27..29: note = n is a, c, g, t or u
  modified_base 20: mod_base = OTHER; note = uracil
  modified_base 33..34: mod_base = OTHER; note = uracil
  modified_base 41: mod_base = OTHER; note = uracil
  modified_base 56: mod_base = OTHER; note = uracil
  source 1..59: mol_type = other DNA
tgacaaggcgtagtcacggtnnnactnnntgattaccagatagaacagacacagctact

SEQ ID NO: 1121 - DNA, 58 bp, synthetic construct
  misc_feature 1..58: note = Synthetic Primer
  misc_difference 21..23: note = n is a, c, g, t or u
  misc_difference 27..29: note = n is a, c, g, t or u
  modified_base 20: mod_base = OTHER; note = uracil
  modified_base 33: mod_base = OTHER; note = uracil
  modified_base 40: mod_base = OTHER; note = uracil
  modified_base 43: mod_base = OTHER; note = uracil
  modified_base 51: mod_base = OTHER; note = uracil
  modified_base 53: mod_base = OTHER; note = uracil
  modified_base 57: mod_base = OTHER; note = uracil
  source 1..58: mol_type = other DNA
tgacaaggcgtagtcacggtnnnactnnntgatgagccatagtggagagctgtaaatt

SEQ ID NO: 1122 - DNA, 59 bp, synthetic construct
  misc_feature 1..59: note = Synthetic Primer
  misc_difference 21..23: note = n is a, c, g, t or u
  misc_difference 27..29: note = n is a, c, g, t or u
  modified_base 20: mod_base = OTHER; note = uracil
  modified_base 33: mod_base = OTHER; note = uracil
  modified_base 35..36: mod_base = OTHER; note = uracil
  modified_base 41: mod_base = OTHER; note = uracil
  modified_base 45: mod_base = OTHER; note = uracil
  modified_base 55..56: mod_base = OTHER; note = uracil
  source 1..59: mol_type = other DNA
tgacaaggcgtagtcacggtnnnactnnntgatgttcaaatgagtagacacagcttgag

SEQ ID NO: 1123 - DNA, 56 bp, synthetic construct
  misc_feature 1..56: note = Synthetic Primer
  misc_difference 21..23: note = n is a, c, g, t or u
  misc_difference 27..29: note = n is a, c, g, t or u
  modified_base 20: mod_base = OTHER; note = uracil
  modified_base 33..35: mod_base = OTHER; note = uracil
  modified_base 44: mod_base = OTHER; note = uracil
  modified_base 46..47: mod_base = OTHER; note = uracil
  modified_base 53: mod_base = OTHER; note = uracil
  source 1..56: mol_type = other DNA
tgacaaggcgtagtcacggtnnnactnnntgatttagagggactcttcccaatgga

SEQ ID NO: 1124 - DNA, 61 bp, synthetic construct
  misc_feature 1..61: note = Synthetic Primer
  misc_difference 21..23: note = n is a, c, g, t or u
  misc_difference 27..29: note = n is a, c, g, t or u
  modified_base 20: mod_base = OTHER; note = uracil
  modified_base 33..34: mod_base = OTHER; note = uracil
  modified_base 44: mod_base = OTHER; note = uracil
  modified_base 48: mod_base = OTHER; note = uracil
  modified_base 51..52: mod_base = OTHER; note = uracil
  modified_base 55: mod_base = OTHER; note = uracil
  modified_base 60: mod_base = OTHER; note = uracil
  source 1..61: mol_type = other DNA
tgacaaggcgtagtcacggtnnnactnnntgattgaagacagatggctcattcataggata

SEQ ID NO: 1125 - DNA, 57 bp, synthetic construct
  misc_feature 1..57: note = Synthetic Primer
  misc_difference 21..23: note = n is a, c, g, t or u
  misc_difference 27..29: note = n is a, c, g, t or u
  modified_base 20: mod_base = OTHER; note = uracil
  modified_base 33..38: mod_base = OTHER; note = uracil
  modified_base 44..45: mod_base = OTHER; note = uracil
  modified_base 50: mod_base = OTHER; note = uracil
  modified_base 54: mod_base = OTHER; note = uracil
  source 1..57: mol_type = other DNA
tgacaaggcgtagtcacggtnnnactnnntgattttttcagcattaacatgcgtgct

SEQ ID NO: 1126 - DNA, 58 bp, synthetic construct
  misc_feature 1..58: note = Synthetic Primer
  misc_difference 21..23: note = n is a, c, g, t or u
  misc_difference 27..29: note = n is a, c, g, t or u
  modified_base 20: mod_base = OTHER; note = uracil
  modified_base 33: mod_base = OTHER; note = uracil
  modified_base 39: mod_base = OTHER; note = uracil
  modified_base 41: mod_base = OTHER; note = uracil
  modified_base 44: mod_base = OTHER; note = uracil
  modified_base 46: mod_base = OTHER; note = uracil
  modified_base 54..56: mod_base = OTHER; note = uracil
  source 1..58: mol_type = other DNA
tgacaaggcgtagtcacggtnnnactnnntgatgcaaatgtaatctaccaggctttgg

SEQ ID NO: 1127 - DNA, 55 bp, synthetic construct
  misc_feature 1..55: note = Synthetic Primer
  misc_difference 21..23: note = n is a, c, g, t or u
  misc_difference 27..29: note = n is a, c, g, t or u
  modified_base 20: mod_base = OTHER; note = uracil
  modified_base 33: mod_base = OTHER; note = uracil
  modified_base 35: mod_base = OTHER; note = uracil
  modified_base 37: mod_base = OTHER; note = uracil
  modified_base 41: mod_base = OTHER; note = uracil
  modified_base 43: mod_base = OTHER; note = uracil
  modified_base 45: mod_base = OTHER; note = uracil
  modified_base 47: mod_base = OTHER; note = uracil
  modified_base 52: mod_base = OTHER; note = uracil
  source 1..55: mol_type = other DNA
tgacaaggcgtagtcacggtnnnactnnntgatctctgaatctctgtgccctcag

SEQ ID NO: 1128 - DNA, 54 bp, synthetic construct
  misc_feature 1..54: note = Synthetic Primer
  misc_difference 21..23: note = n is a, c, g, t or u
  misc_difference 27..29: note = n is a, c, g, t or u
  modified_base 20: mod_base = OTHER; note = uracil
  modified_base 33: mod_base = OTHER; note = uracil
  modified_base 35..36: mod_base = OTHER; note = uracil
  modified_base 43..44: mod_base = OTHER; note = uracil
  source 1..54: mol_type = other DNA
tgacaaggcgtagtcacggtnnnactnnntgatcttgggcacttgcacagagat

SEQ ID NO: 1129 - DNA, 61 bp, synthetic construct
  misc_feature 1..61: note = Synthetic Primer
  misc_difference 21..23: note = n is a, c, g, t or u
  misc_difference 27..29: note = n is a, c, g, t or u
  modified_base 20: mod_base = OTHER; note = uracil
  modified_base 33..34: mod_base = OTHER; note = uracil
  modified_base 39: mod_base = OTHER; note = uracil
  modified_base 45..46: mod_base = OTHER; note = uracil
  modified_base 49: mod_base = OTHER; note = uracil
  source 1..61: mol_type = other DNA
tgacaaggcgtagtcacggtnnnactnnntgattagaatgccagttaatgaaaacagaacg

SEQ ID NO: 1130 - DNA, 50 bp, synthetic construct
  misc_feature 1..50: note = Synthetic Primer
  misc_difference 21..23: note = n is a, c, g, t or u
  misc_difference 27..29: note = n is a, c, g, t or u
  modified_base 20: mod_base = OTHER; note = uracil
  modified_base 33: mod_base = OTHER; note = uracil
  modified_base 36: mod_base = OTHER; note = uracil
  modified_base 42: mod_base = OTHER; note = uracil
  source 1..50: mol_type = other DNA
tgacaaggcgtagtcacggtnnnactnnntgatggtcgccctccacgcag

SEQ ID NO: 1131 - DNA, 53 bp, synthetic construct
  misc_feature 1..53: note = Synthetic Primer
  misc_difference 21..23: note = n is a, c, g, t or u
  misc_difference 27..29: note = n is a, c, g, t or u
  modified_base 20: mod_base = OTHER; note = uracil
  modified_base 33: mod_base = OTHER; note = uracil
  modified_base 35..36: mod_base = OTHER; note = uracil
  modified_base 50..51: mod_base = OTHER; note = uracil
  source 1..53: mol_type = other DNA
tgacaaggcgtagtcacggtnnnactnnntgatcttaccaggcaaggccttgg

SEQ ID NO: 1132 - DNA, 52 bp, synthetic construct
  misc_feature 1..52: note = Synthetic Primer
  misc_difference 21..23: note = n is a, c, g, t or u
  misc_difference 27..29: note = n is a, c, g, t or u
  modified_base 20: mod_base = OTHER; note = uracil
  modified_base 33..34: mod_base = OTHER; note = uracil
  modified_base 36: mod_base = OTHER; note = uracil
  modified_base 42: mod_base = OTHER; note = uracil
  source 1..52: mol_type = other DNA
tgacaaggcgtagtcacggtnnnactnnntgattgtacacgtcccgggacat

SEQ ID NO: 1133 - DNA, 52 bp, synthetic construct
  misc_feature 1..52: note = Synthetic Primer
  misc_difference 21..23: note = n is a, c, g, t or u
  misc_difference 27..29: note = n is a, c, g, t or u
  modified_base 20: mod_base = OTHER; note = uracil
  modified_base 33: mod_base = OTHER; note = uracil
  modified_base 36: mod_base = OTHER; note = uracil
  modified_base 39: mod_base = OTHER; note = uracil
  modified_base 46: mod_base = OTHER; note = uracil
  source 1..52: mol_type = other DNA
tgacaaggcgtagtcacggtnnnactnnntgatactcctgaaccctgaaggc

SEQ ID NO: 1134 - DNA, 57 bp, synthetic construct
  misc_feature 1..57: note = Synthetic Primer
  misc_difference 21..23: note = n is a, c, g, t or u
  misc_difference 27..29: note = n is a, c, g, t or u
  modified_base 20: mod_base = OTHER; note = uracil
  modified_base 33: mod_base = OTHER; note = uracil
  modified_base 49: mod_base = OTHER; note = uracil
  modified_base 54: mod_base = OTHER; note = uracil
  source 1..57: mol_type = other DNA
tgacaaggcgtagtcacggtnnnactnnntgatagacccaaagggcagtaagatagg

SEQ ID NO: 1135 - DNA, 56 bp, synthetic construct
  misc_feature 1..56: note = Synthetic Primer
  misc_difference 21..23: note = n is a, c, g, t or u
  misc_difference 27..29: note = n is a, c, g, t or u
  modified_base 20: mod_base = OTHER; note = uracil
  modified_base 33: mod_base = OTHER; note = uracil
  modified_base 35: mod_base = OTHER; note = uracil
  modified_base 44: mod_base = OTHER; note = uracil
  modified_base 49: mod_base = OTHER; note = uracil
  modified_base 51..52: mod_base = OTHER; note = uracil
  modified_base 54: mod_base = OTHER; note = uracil
  source 1..56: mol_type = other DNA
tgacaaggcgtagtcacggtnnnactnnntgatataccccagctcagatcttctcc

SEQ ID NO: 1136 - DNA, 52 bp, synthetic construct
  misc_feature 1..52: note = Synthetic Primer
  misc_difference 21..23: note = n is a, c, g, t or u
  misc_difference 27..29: note = n is a, c, g, t or u
  modified_base 20: mod_base = OTHER; note = uracil
  modified_base 33: mod_base = OTHER; note = uracil
  modified_base 35..36: mod_base = OTHER; note = uracil
  modified_base 41..42: mod_base = OTHER; note = uracil
  modified_base 50: mod_base = OTHER; note = uracil
  source 1..52: mol_type = other DNA
tgacaaggcgtagtcacggtnnnactnnntgatgttgcccttggaggcatac

SEQ ID NO: 1137 - DNA, 64 bp, synthetic construct
  misc_feature 1..64: note = Synthetic Primer
  misc_difference 21..23: note = n is a, c, g, t or u
  misc_difference 27..29: note = n is a, c, g, t or u
  modified_base 20: mod_base = OTHER; note = uracil
  modified_base 33: mod_base = OTHER; note = uracil
  modified_base 36: mod_base = OTHER; note = uracil
  modified_base 38: mod_base = OTHER; note = uracil
  modified_base 41: mod_base = OTHER; note = uracil
  modified_base 43..46: mod_base = OTHER; note = uracil
  modified_base 49..51: mod_base = OTHER; note = uracil
  modified_base 54..55: mod_base = OTHER; note = uracil
  modified_base 58: mod_base = OTHER; note = uracil
  source 1..64: mol_type = other DNA
tgacaaggcgtagtcacggtnnnactnnntgatgatctactgttttcctttacttactacacct

SEQ ID NO: 1138 - DNA, 55 bp, synthetic construct
  misc_feature 1..55: note = Synthetic Primer
  misc_difference 21..23: note = n is a, c, g, t or u
  misc_difference 27..29: note = n is a, c, g, t or u
  modified_base 20: mod_base = OTHER; note = uracil
  modified_base 33: mod_base = OTHER; note = uracil
  modified_base 40..41: mod_base = OTHER; note = uracil
  modified_base 49: mod_base = OTHER; note = uracil
  modified_base 54: mod_base = OTHER; note = uracil
  source 1..55: mol_type = other DNA
tgacaaggcgtagtcacggtnnnactnnntgatgggacattcaccacatcgacta

SEQ ID NO: 1139 - DNA, 57 bp, synthetic construct
  misc_feature 1..57: note = Synthetic Primer
  misc_difference 21..23: note = n is a, c, g, t or u
  misc_difference 27..29: note = n is a, c, g, t or u
  modified_base 20: mod_base = OTHER; note = uracil
  modified_base 33: mod_base = OTHER; note = uracil
  modified_base 35: mod_base = OTHER; note = uracil
  modified_base 38: mod_base = OTHER; note = uracil
  modified_base 41..42: mod_base = OTHER; note = uracil
  modified_base 49..50: mod_base = OTHER; note = uracil
  modified_base 53: mod_base = OTHER; note = uracil
  modified_base 56: mod_base = OTHER; note = uracil
  source 1..57: mol_type = other DNA
tgacaaggcgtagtcacggtnnnactnnntgatgtgatgattgggagattcctgatg

SEQ ID NO: 1140 - DNA, 59 bp, synthetic construct
  misc_feature 1..59: note = Synthetic Primer
  misc_difference 21..23: note = n is a, c, g, t or u
  misc_difference 27..29: note = n is a, c, g, t or u
  modified_base 20: mod_base = OTHER; note = uracil
  modified_base 33: mod_base = OTHER; note = uracil
  modified_base 36: mod_base = OTHER; note = uracil
  modified_base 39: mod_base = OTHER; note = uracil
  modified_base 42: mod_base = OTHER; note = uracil
  modified_base 46: mod_base = OTHER; note = uracil
  modified_base 49: mod_base = OTHER; note = uracil
  modified_base 51: mod_base = OTHER; note = uracil
  modified_base 55: mod_base = OTHER; note = uracil
  modified_base 57: mod_base = OTHER; note = uracil
  source 1..59: mol_type = other DNA
tgacaaggcgtagtcacggtnnnactnnntgatggtaatagtcggtgctgtagatatcc

SEQ ID NO: 1141 - DNA, 57 bp, synthetic construct
  misc_feature 1..57: note = Synthetic Primer
  misc_difference 21..23: note = n is a, c, g, t or u
  misc_difference 27..29: note = n is a, c, g, t or u
  modified_base 20: mod_base = OTHER; note = uracil
  modified_base 33..35: mod_base = OTHER; note = uracil
  modified_base 40: mod_base = OTHER; note = uracil
  modified_base 43..44: mod_base = OTHER; note = uracil
  modified_base 46: mod_base = OTHER; note = uracil
  modified_base 56: mod_base = OTHER; note = uracil
  source 1..57: mol_type = other DNA
tgacaaggcgtagtcacggtnnnactnnntgatttgccatcattgtccaacaaagtc

SEQ ID NO: 1142 - DNA, 55 bp, synthetic construct
  misc_feature 1..55: note = Synthetic Primer
  misc_difference 21..23: note = n is a, c, g, t or u
  misc_difference 27..29: note = n is a, c, g, t or u
  modified_base 20: mod_base = OTHER; note = uracil
  modified_base 33: mod_base = OTHER; note = uracil
  modified_base 39: mod_base = OTHER; note = uracil
  modified_base 41: mod_base = OTHER; note = uracil
  modified_base 43: mod_base = OTHER; note = uracil
  modified_base 46: mod_base = OTHER; note = uracil
  modified_base 48..49: mod_base = OTHER; note = uracil
  modified_base 53: mod_base = OTHER; note = uracil
  source 1..55: mol_type = other DNA
tgacaaggcgtagtcacggtnnnactnnntgataggagtgtgtactcttgcatcg

SEQ ID NO: 1143 - DNA, 51 bp, synthetic construct
  misc_feature 1..51: note = Synthetic Primer
  misc_difference 21..23: note = n is a, c, g, t or u
  misc_difference 27..29: note = n is a, c, g, t or u
  modified_base 20: mod_base = OTHER; note = uracil
  modified_base 33: mod_base = OTHER; note = uracil
  modified_base 35: mod_base = OTHER; note = uracil
  modified_base 44: mod_base = OTHER; note = uracil
  source 1..51: mol_type = other DNA
tgacaaggcgtagtcacggtnnnactnnntgatgtgaggcagatgcccagc

SEQ ID NO: 1144 - DNA, 52 bp, synthetic construct
  misc_feature 1..52: note = Synthetic Primer
  misc_difference 21..23: note = n is a, c, g, t or u
  misc_difference 27..29: note = n is a, c, g, t or u
  modified_base 20: mod_base = OTHER; note = uracil
  modified_base 33: mod_base = OTHER; note = uracil
  modified_base 35: mod_base = OTHER; note = uracil
  modified_base 47..48: mod_base = OTHER; note = uracil
  source 1..52: mol_type = other DNA
tgacaaggcgtagtcacggtnnnactnnntgatctgcacacaccagttgagc

SEQ ID NO: 1145 - DNA, 56 bp, synthetic construct
  misc_feature 1..56: note = Synthetic Primer
  misc_difference 21..23: note = n is a, c, g, t or u
  misc_difference 27..29: note = n is a, c, g, t or u
  modified_base 20: mod_base = OTHER; note = uracil
  modified_base 33: mod_base = OTHER; note = uracil
  modified_base 50: mod_base = OTHER; note = uracil
  modified_base 55: mod_base = OTHER; note = uracil
  source 1..56: mol_type = other DNA
tgacaaggcgtagtcacggtnnnactnnntgatacagcaaagcagaaactcacatc

SEQ ID NO: 1146 - DNA, 57 bp, synthetic construct
  misc_feature 1..57: note = Synthetic Primer
  misc_difference 21..23: note = n is a, c, g, t or u
  misc_difference 27..29: note = n is a, c, g, t or u
  modified_base 20: mod_base = OTHER; note = uracil
  modified_base 33: mod_base = OTHER; note = uracil
  modified_base 35: mod_base = OTHER; note = uracil
  modified_base 37: mod_base = OTHER; note = uracil
  modified_base 48..49: mod_base = OTHER; note = uracil
  modified_base 53..54: mod_base = OTHER; note = uracil
  modified_base 56: mod_base = OTHER; note = uracil
  source 1..57: mol_type = other DNA
tgacaaggcgtagtcacggtnnnactnnntgatctgtgccagggaccttaccttata

SEQ ID NO: 1147 - DNA, 51 bp, synthetic construct
  misc_feature 1..51: note = Synthetic Primer
  misc_difference 21..23: note = n is a, c, g, t or u
  misc_difference 27..29: note = n is a, c, g, t or u
  modified_base 20: mod_base = OTHER; note = uracil
  modified_base 33: mod_base = OTHER; note = uracil
  modified_base 35: mod_base = OTHER; note = uracil
  modified_base 50: mod_base = OTHER; note = uracil
  source 1..51: mol_type = other DNA
tgacaaggcgtagtcacggtnnnactnnntgatgtaccggaggaagcggtt

SEQ ID NO: 1148 - DNA, 56 bp, synthetic construct
  misc_feature 1..56: note = Synthetic Primer
  misc_difference 21..23: note = n is a, c, g, t or u
  misc_difference 27..29: note = n is a, c, g, t or u
  modified_base 20: mod_base = OTHER; note = uracil
  modified_base 33..35: mod_base = OTHER; note = uracil
  modified_base 47: mod_base = OTHER; note = uracil
  modified_base 49..50: mod_base = OTHER; note = uracil
  modified_base 52..55: mod_base = OTHER; note = uracil
  source 1..56: mol_type = other DNA
tgacaaggcgtagtcacggtnnnactnnntgatttccagaccagggtgttgttttc

SEQ ID NO: 1149 - DNA, 61 bp, synthetic construct
  misc_feature 1..61: note = Synthetic Primer
  misc_difference 21..23: note = n is a, c, g, t or u
  misc_difference 27..29: note = n is a, c, g, t or u
  modified_base 20: mod_base = OTHER; note = uracil
  modified_base 33: mod_base = OTHER; note = uracil
  modified_base 37: mod_base = OTHER; note = uracil
  modified_base 48..49: mod_base = OTHER; note = uracil
  modified_base 59: mod_base = OTHER; note = uracil
  source 1..61: mol_type = other DNA
tgacaaggcgtagtcacggtnnnactnnntgataaataaaggacccattagaaccaactcc

SEQ ID NO: 1150 - DNA, 64 bp, synthetic construct
  misc_feature 1..64: note = Synthetic Primer
  misc_difference 21..23: note = n is a, c, g, t or u
  misc_difference 27..29: note = n is a, c, g, t or u
  modified_base 20: mod_base = OTHER; note = uracil
  modified_base 33..38: mod_base = OTHER; note = uracil
  modified_base 43..45: mod_base = OTHER; note = uracil
  modified_base 47..48: mod_base = OTHER; note = uracil
  modified_base 50: mod_base = OTHER; note = uracil
  modified_base 52..54: mod_base = OTHER; note = uracil
  modified_base 58: mod_base = OTHER; note = uracil
  source 1..64: mol_type = other DNA
tgacaaggcgtagtcacggtnnnactnnntgattttttccagtttattgtatttgcatagcaca

SEQ ID NO: 1151 - DNA, 54 bp, synthetic construct
  misc_feature 1..54: note = Synthetic Primer
  misc_difference 21..23: note = n is a, c, g, t or u
  misc_difference 27..29: note = n is a, c, g, t or u
  modified_base 20: mod_base = OTHER; note = uracil
  modified_base 33: mod_base = OTHER; note = uracil
  modified_base 37: mod_base = OTHER; note = uracil
  modified_base 41: mod_base = OTHER; note = uracil
  modified_base 48..49: mod_base = OTHER; note = uracil
  source 1..54: mol_type = other DNA
tgacaaggcgtagtcacggtnnnactnnntgatggatgcctgaccagttagagg

SEQ ID NO: 1152 - DNA, 59 bp, synthetic construct
  misc_feature 1..59: note = Synthetic Primer
  misc_difference 21..23: note = n is a, c, g, t or u
  misc_difference 27..29: note = n is a, c, g, t or u
  modified_base 20: mod_base = OTHER; note = uracil
  modified_base 33: mod_base = OTHER; note = uracil
  modified_base 38: mod_base = OTHER; note = uracil
  modified_base 41: mod_base = OTHER; note = uracil
  modified_base 48: mod_base = OTHER; note = uracil
  modified_base 54..57: mod_base = OTHER; note = uracil
  source 1..59: mol_type = other DNA
tgacaaggcgtagtcacggtnnnactnnntgatagactgctaaggcataggaattttcg

SEQ ID NO: 1153 - DNA, 51 bp, synthetic construct
  misc_feature 1..51: note = Synthetic Primer
  misc_difference 21..23: note = n is a, c, g, t or u
  misc_difference 27..29: note = n is a, c, g, t or u
  modified_base 20: mod_base = OTHER; note = uracil
  modified_base 33: mod_base = OTHER; note = uracil
  modified_base 37: mod_base = OTHER; note = uracil
  modified_base 39: mod_base = OTHER; note = uracil
  modified_base 42: mod_base = OTHER; note = uracil
  modified_base 50: mod_base = OTHER; note = uracil
  source 1..51: mol_type = other DNA
tgacaaggcgtagtcacggtnnnactnnntgatccgtctcctccacggatg

SEQ ID NO: 1154 - DNA, 57 bp, synthetic construct
  misc_feature 1..57: note = Synthetic Primer
  misc_difference 21..23: note = n is a, c, g, t or u
  misc_difference 27..29: note = n is a, c, g, t or u
  modified_base 20: mod_base = OTHER; note = uracil
  modified_base 33: mod_base = OTHER; note = uracil
  modified_base 35: mod_base = OTHER; note = uracil
  modified_base 38..39: mod_base = OTHER; note = uracil
  modified_base 41: mod_base = OTHER; note = uracil
  modified_base 43..44: mod_base = OTHER; note = uracil
  modified_base 53..54: mod_base = OTHER; note = uracil
  source 1..57: mol_type = other DNA
tgacaaggcgtagtcacggtnnnactnnntgatgtccttctcttccagagacttcag

SEQ ID NO: 1155 - DNA, 53 bp, synthetic construct
  misc_feature 1..53: note = Synthetic Primer
  misc_difference 21..23: note = n is a, c, g, t or u
  misc_difference 27..29: note = n is a, c, g, t or u
  modified_base 20: mod_base = OTHER; note = uracil
  modified_base 33: mod_base = OTHER; note = uracil
  modified_base 40: mod_base = OTHER; note = uracil
  modified_base 44..45: mod_base = OTHER; note = uracil
  modified_base 49: mod_base = OTHER; note = uracil
  source 1..53: mol_type = other DNA
tgacaaggcgtagtcacggtnnnactnnntgataaacagtagcttccctgggt

SEQ ID NO: 1156 - DNA, 54 bp, synthetic construct
  misc_feature 1..54: note = Synthetic Primer
  misc_difference 21..23: note = n is a, c, g, t or u
  misc_difference 27..29: note = n is a, c, g, t or u
  modified_base 20: mod_base = OTHER; note = uracil
  modified_base 33: mod_base = OTHER; note = uracil
  modified_base 39: mod_base = OTHER; note = uracil
  modified_base 52: mod_base = OTHER; note = uracil
  source 1..54: mol_type = other DNA
tgacaaggcgtagtcacggtnnnactnnntgatcagcatccaacaaggcactga

SEQ ID NO: 1157 - DNA, 56 bp, synthetic construct
  misc_feature 1..56: note = Synthetic Primer
  misc_difference 21..23: note = n is a, c, g, t or u
  misc_difference 27..29: note = n is a, c, g, t or u
  modified_base 20: mod_base = OTHER; note = uracil
  modified_base 33: mod_base = OTHER; note = uracil
  modified_base 36: mod_base = OTHER; note = uracil
  modified_base 39: mod_base = OTHER; note = uracil
  modified_base 41..42: mod_base = OTHER; note = uracil
  modified_base 45..46: mod_base = OTHER; note = uracil
  modified_base 49: mod_base = OTHER; note = uracil
  modified_base 54..55: mod_base = OTHER; note = uracil
  source 1..56: mol_type = other DNA
tgacaaggcgtagtcacggtnnnactnnntgatactgctgttccttcatacacttc

SEQ ID NO: 1158 - DNA, 51 bp, synthetic construct
  misc_feature 1..51: note = Synthetic Primer
  misc_difference 21..23: note = n is a, c, g, t or u
  misc_difference 27..29: note = n is a, c, g, t or u
  modified_base 20: mod_base = OTHER; note = uracil
  modified_base 33: mod_base = OTHER; note = uracil
  modified_base 35: mod_base = OTHER; note = uracil
  modified_base 43: mod_base = OTHER; note = uracil
  modified_base 50: mod_base = OTHER; note = uracil
  source 1..51: mol_type = other DNA
tgacaaggcgtagtcacggtnnnactnnntgatctccacccctgaagcctg

SEQ ID NO: 1159 - DNA, 59 bp, synthetic construct
  misc_feature 1..59: note = Synthetic Primer
  misc_difference 21..23: note = n is a, c, g, t or u
  misc_difference 27..29: note = n is a, c, g, t or u
  modified_base 20: mod_base = OTHER; note = uracil
  modified_base 33: mod_base = OTHER; note = uracil
  modified_base 36: mod_base = OTHER; note = uracil
  modified_base 45: mod_base = OTHER; note = uracil
  modified_base 47: mod_base = OTHER; note = uracil
  modified_base 49: mod_base = OTHER; note = uracil
  modified_base 52: mod_base = OTHER; note = uracil
  modified_base 54: mod_base = OTHER; note = uracil
  modified_base 57: mod_base = OTHER; note = uracil
  source 1..59: mol_type = other DNA
tgacaaggcgtagtcacggtnnnactnnntgatgctcacagaaatgtctgctatactga

SEQ ID NO: 1160 - DNA, 59 bp, synthetic construct
  misc_feature 1..59: note = Synthetic Primer
  misc_difference 21..23: note = n is a, c, g, t or u
  misc_difference 27..29: note = n is a, c, g, t or u
  modified_base 20: mod_base = OTHER; note = uracil
  modified_base 33: mod_base = OTHER; note = uracil
  modified_base 36: mod_base = OTHER; note = uracil
  modified_base 38: mod_base = OTHER; note = uracil
  modified_base 43: mod_base = OTHER; note = uracil
  modified_base 47: mod_base = OTHER; note = uracil
  modified_base 51: mod_base = OTHER; note = uracil
  modified_base 58: mod_base = OTHER; note = uracil
  source 1..59: mol_type = other DNA
tgacaaggcgtagtcacggtnnnactnnntgatggtgtgaaatgactgagtacaaactg

SEQ ID NO: 1161 - DNA, 61 bp, synthetic construct
  misc_feature 1..61: note = Synthetic Primer
  misc_difference 21..23: note = n is a, c, g, t or u
  misc_difference 27..29: note = n is a, c, g, t or u
  modified_base 20: mod_base = OTHER; note = uracil
  modified_base 33..34: mod_base = OTHER; note = uracil
  modified_base 36: mod_base = OTHER; note = uracil
  modified_base 41..42: mod_base = OTHER; note = uracil
  modified_base 47: mod_base = OTHER; note = uracil
  modified_base 49: mod_base = OTHER; note = uracil
  modified_base 52: mod_base = OTHER; note = uracil
  modified_base 55: mod_base = OTHER; note = uracil
  modified_base 57: mod_base = OTHER; note = uracil
  source 1..61: mol_type = other DNA
tgacaaggcgtagtcacggtnnnactnnntgattgtagacttggaatctactgatatccct

SEQ ID NO: 1162 - DNA, 57 bp, synthetic construct
  misc_feature 1..57: note = Synthetic Primer
  misc_difference 21..23: note = n is a, c, g, t or u
  misc_difference 27..29: note = n is a, c, g, t or u
  modified_base 20: mod_base = OTHER; note = uracil
  modified_base 33..34: mod_base = OTHER; note = uracil
  modified_base 39..41: mod_base = OTHER; note = uracil
  modified_base 43: mod_base = OTHER; note = uracil
  modified_base 45: mod_base = OTHER; note = uracil
  modified_base 48: mod_base = OTHER; note = uracil
  modified_base 52: mod_base = OTHER; note = uracil
  source 1..57: mol_type = other DNA
tgacaaggcgtagtcacggtnnnactnnntgattggagtttgtctgctgaatgaacc

SEQ ID NO: 1163 - DNA, 54 bp, synthetic construct
  misc_feature 1..54: note = Synthetic Primer
  misc_difference 21..23: note = n is a, c, g, t or u
  misc_difference 27..29: note = n is a, c, g, t or u
  modified_base 20: mod_base = OTHER; note = uracil
  modified_base 33: mod_base = OTHER; note = uracil
  modified_base 35..36: mod_base = OTHER; note = uracil
  modified_base 42: mod_base = OTHER; note = uracil
  modified_base 48: mod_base = OTHER; note = uracil
  modified_base 50..51: mod_base = OTHER; note = uracil
  modified_base 53: mod_base = OTHER; note = uracil
  source 1..54: mol_type = other DNA
tgacaaggcgtagtcacggtnnnactnnntgatcttggagctggagctcttgtg

SEQ ID NO: 1164 - DNA, 61 bp, synthetic construct
  misc_feature 1..61: note = Synthetic Primer
  misc_difference 21..23: note = n is a, c, g, t or u
  misc_difference 27..29: note = n is a, c, g, t or u
  modified_base 20: mod_base = OTHER; note = uracil
  modified_base 33: mod_base = OTHER; note = uracil
  modified_base 35..36: mod_base = OTHER; note = uracil
  modified_base 39..40: mod_base = OTHER; note = uracil
  modified_base 42..44: mod_base = OTHER; note = uracil
  modified_base 46: mod_base = OTHER; note = uracil
  modified_base 49: mod_base = OTHER; note = uracil
  source 1..61: mol_type = other DNA
tgacaaggcgtagtcacggtnnnactnnntgatattgattgtttctaatagagcagccaga

SEQ ID NO: 1165 - DNA, 59 bp, synthetic construct
  misc_feature 1..59: note = Synthetic Primer
  misc_difference 21..23: note = n is a, c, g, t or u
  misc_difference 27..29: note = n is a, c, g, t or u
  modified_base 20: mod_base = OTHER; note = uracil
  modified_base 33: mod_base = OTHER; note = uracil
  modified_base 40: mod_base = OTHER; note = uracil
  modified_base 46: mod_base = OTHER; note = uracil
  modified_base 51..52: mod_base = OTHER; note = uracil
  modified_base 56..57: mod_base = OTHER; note = uracil
  source 1..59: mol_type = other DNA
tgacaaggcgtagtcacggtnnnactnnntgatagagcctaaacatccccttaaattgg

SEQ ID NO: 1166 - DNA, 58 bp, synthetic construct
  misc_feature 1..58: note = Synthetic Primer
  misc_difference 21..23: note = n is a, c, g, t or u
  misc_difference 27..29: note = n is a, c, g, t or u
  modified_base 20: mod_base = OTHER; note = uracil
  modified_base 33..34: mod_base = OTHER; note = uracil
  modified_base 37: mod_base = OTHER; note = uracil
  modified_base 44: mod_base = OTHER; note = uracil
  modified_base 46..48: mod_base = OTHER; note = uracil
  modified_base 50..51: mod_base = OTHER; note = uracil
  modified_base 57: mod_base = OTHER; note = uracil
  source 1..58: mol_type = other DNA
tgacaaggcgtagtcacggtnnnactnnntgattggtgaaacctgtttgttggacata

SEQ ID NO: 1167 - DNA, 59 bp, synthetic construct
  misc_feature 1..59: note = Synthetic Primer
  misc_difference 21..23: note = n is a, c, g, t or u
  misc_difference 27..29: note = n is a, c, g, t or u
  modified_base 20: mod_base = OTHER; note = uracil
  modified_base 33: mod_base = OTHER; note = uracil
  modified_base 36: mod_base = OTHER; note = uracil
  modified_base 46: mod_base = OTHER; note = uracil
  modified_base 51: mod_base = OTHER; note = uracil
  modified_base 58: mod_base = OTHER; note = uracil
  source 1..59: mol_type = other DNA
tgacaaggcgtagtcacggtnnnactnnntgatcctgacccaagatgaaataaaacgtc

SEQ ID NO: 1168 - DNA, 60 bp, synthetic construct
  misc_feature 1..60: note = Synthetic Primer
  misc_difference 21..23: note = n is a, c, g, t or u
  misc_difference 27..29: note = n is a, c, g, t or u
  modified_base 20: mod_base = OTHER; note = uracil
  modified_base 33..34: mod_base = OTHER; note = uracil
  modified_base 40: mod_base = OTHER; note = uracil
  modified_base 46: mod_base = OTHER; note = uracil
  modified_base 49..51: mod_base = OTHER; note = uracil
  modified_base 59: mod_base = OTHER; note = uracil
  source 1..60: mol_type = other DNA
tgacaaggcgtagtcacggtnnnactnnntgattgaaactaaaaatcctttgcaggactg

SEQ ID NO: 1169 - DNA, 58 bp, synthetic construct
  misc_feature 1..58: note = Synthetic Primer
  misc_difference 21..23: note = n is a, c, g, t or u
  misc_difference 27..29: note = n is a, c, g, t or u
  modified_base 20: mod_base = OTHER; note = uracil
  modified_base 33..34: mod_base = OTHER; note = uracil
  modified_base 36..38: mod_base = OTHER; note = uracil
  modified_base 40: mod_base = OTHER; note = uracil
  modified_base 43: mod_base = OTHER; note = uracil
  modified_base 51: mod_base = OTHER; note = uracil
  modified_base 55: mod_base = OTHER; note = uracil
  source 1..58: mol_type = other DNA
tgacaaggcgtagtcacggtnnnactnnntgattctttgtgatccgaccatgagtaag

SEQ ID NO: 1170 - DNA, 54 bp, synthetic construct
  misc_feature 1..54: note = Synthetic Primer
  misc_difference 21..23: note = n is a, c, g, t or u
  misc_difference 27..29: note = n is a, c, g, t or u
  modified_base 20: mod_base = OTHER; note = uracil
  modified_base 33: mod_base = OTHER; note = uracil
  modified_base 37: mod_base = OTHER; note = uracil
  modified_base 40: mod_base = OTHER; note = uracil
  modified_base 43: mod_base = OTHER; note = uracil
  modified_base 52..53: mod_base = OTHER; note = uracil
  source 1..54: mol_type = other DNA
tgacaaggcgtagtcacggtnnnactnnntgatgaatcctgctgccacacattg

SEQ ID NO: 1171 - DNA, 53 bp, synthetic construct
  misc_feature 1..53: note = Synthetic Primer
  misc_difference 21..23: note = n is a, c, g, t or u
  misc_difference 27..29: note = n is a, c, g, t or u
  modified_base 20: mod_base = OTHER; note = uracil
  modified_base 33: mod_base = OTHER; note = uracil
  modified_base 39: mod_base = OTHER; note = uracil
  modified_base 45: mod_base = OTHER; note = uracil
  modified_base 52: mod_base = OTHER; note = uracil
  source 1..53: mol_type = other DNA
tgacaaggcgtagtcacggtnnnactnnntgatgaggatgagcctgaccagtg

SEQ ID NO: 1172 - DNA, 58 bp, synthetic construct
  misc_feature 1..58: note = Synthetic Primer
  misc_difference 21..23: note = n is a, c, g, t or u
  misc_difference 27..29: note = n is a, c, g, t or u
  modified_base 20: mod_base = OTHER; note = uracil
  modified_base 33..34: mod_base = OTHER; note = uracil
  modified_base 36..38: mod_base = OTHER; note = uracil
  modified_base 44: mod_base = OTHER; note = uracil
  source 1..58: mol_type = other DNA
tgacaaggcgtagtcacggtnnnactnnntgattgtttccaaatgacaaccaggacaa

SEQ ID NO: 1173 - DNA, 51 bp, synthetic construct
  misc_feature 1..51: note = Synthetic Primer
  misc_difference 21..23: note = n is a, c, g, t or u
  misc_difference 27..29: note = n is a, c, g, t or u
  modified_base 20: mod_base = OTHER; note = uracil
  modified_base 33: mod_base = OTHER; note = uracil
  modified_base 45..47: mod_base = OTHER; note = uracil
  modified_base 49..50: mod_base = OTHER; note = uracil
  source 1..51: mol_type = other DNA
tgacaaggcgtagtcacggtnnnactnnntgatgagcccaggcctttcttg

SEQ ID NO: 1174 - DNA, 59 bp, synthetic construct
  misc_feature 1..59: note = Synthetic Primer
  misc_difference 21..23: note = n is a, c, g, t or u
  misc_difference 27..29: note = n is a, c, g, t or u
  modified_base 20: mod_base = OTHER; note = uracil
  modified_base 33: mod_base = OTHER; note = uracil
  modified_base 41: mod_base = OTHER; note = uracil
  modified_base 46: mod_base = OTHER; note = uracil
  modified_base 49: mod_base = OTHER; note = uracil
  modified_base 51: mod_base = OTHER; note = uracil
  modified_base 55: mod_base = OTHER; note = uracil
  modified_base 57: mod_base = OTHER; note = uracil
  source 1..59: mol_type = other DNA
tgacaaggcgtagtcacggtnnnactnnntgataaaagactcggatgatgtacctatgg

SEQ ID NO: 1175 - DNA, 55 bp, synthetic construct
  misc_feature 1..55: note = Synthetic Primer
  misc_difference 21..23: note = n is a, c, g, t or u
  misc_difference 27..29: note = n is a, c, g, t or u
  modified_base 20: mod_base = OTHER; note = uracil
  modified_base 33: mod_base = OTHER; note = uracil
  modified_base 35: mod_base = OTHER; note = uracil
  modified_base 45..46: mod_base = OTHER; note = uracil
  modified_base 53..54: mod_base = OTHER; note = uracil
  source 1..55: mol_type = other DNA
tgacaaggcgtagtcacggtnnnactnnntgatctggccaagagttacgggattc

SEQ ID NO: 1176 - DNA, 57 bp, synthetic construct
  misc_feature 1..57: note = Synthetic Primer
  misc_difference 21..23: note = n is a, c, g, t or u
  misc_difference 27..29: note = n is a, c, g, t or u
  modified_base 20: mod_base = OTHER; note = uracil
  modified_base 33: mod_base = OTHER; note = uracil
  modified_base 36: mod_base = OTHER; note = uracil
  modified_base 47: mod_base = OTHER; note = uracil
  source 1..57: mol_type = other DNA
tgacaaggcgtagtcacggtnnnactnnntgatagtgacagaaaggtaaagaggagc

SEQ ID NO: 1177 - DNA, 51 bp, synthetic construct
  misc_feature 1..51: note = Synthetic Primer
  misc_difference 21..23: note = n is a, c, g, t or u
  misc_difference 27..29: note = n is a, c, g, t or u
  modified_base 20: mod_base = OTHER; note = uracil
  modified_base 33: mod_base = OTHER; note = uracil
  modified_base 36: mod_base = OTHER; note = uracil
  modified_base 50: mod_base = OTHER; note = uracil
  source 1..51: mol_type = other DNA
tgacaaggcgtagtcacggtnnnactnnntgatgctgccgaagaccaactg

SEQ ID NO: 1178 - DNA, 50 bp, synthetic construct
  misc_feature 1..50: note = Synthetic Primer
  misc_difference 21..23: note = n is a, c, g, t or u
  misc_difference 27..29: note = n is a, c, g, t or u
  modified_base 20: mod_base = OTHER; note = uracil
  modified_base 33: mod_base = OTHER; note = uracil
  modified_base 43: mod_base = OTHER; note = uracil
  modified_base 48: mod_base = OTHER; note = uracil
  source 1..50: mol_type = other DNA
tgacaaggcgtagtcacggtnnnactnnntgatgacagcggctgcgatca

SEQ ID NO: 1179 - DNA, 61 bp, synthetic construct
  misc_feature 1..61: note = Synthetic Primer
  misc_difference 21..23: note = n is a, c, g, t or u
  misc_difference 27..29: note = n is a, c, g, t or u
  modified_base 20: mod_base = OTHER; note = uracil
  modified_base 33..34: mod_base = OTHER; note = uracil
  modified_base 37: mod_base = OTHER; note = uracil
  modified_base 41: mod_base = OTHER; note = uracil
  modified_base 45: mod_base = OTHER; note = uracil
  modified_base 47: mod_base = OTHER; note = uracil
  modified_base 52..53: mod_base = OTHER; note = uracil
  modified_base 57..59: mod_base = OTHER; note = uracil
  source 1..61: mol_type = other DNA
tgacaaggcgtagtcacggtnnnactnnntgattcatacctacctctgcaattaaatttgg

SEQ ID NO: 1180 - DNA, 66 bp, synthetic construct
  misc_feature 1..66: note = Synthetic Primer
  misc_difference 21..23: note = n is a, c, g, t or u
  misc_difference 27..29: note = n is a, c, g, t or u
  modified_base 20: mod_base = OTHER; note = uracil
  modified_base 33..35: mod_base = OTHER; note = uracil
  modified_base 39: mod_base = OTHER; note = uracil
  modified_base 44: mod_base = OTHER; note = uracil
  modified_base 50..52: mod_base = OTHER; note = uracil
  modified_base 54: mod_base = OTHER; note = uracil
  modified_base 62..63: mod_base = OTHER; note = uracil
  modified_base 65: mod_base = OTHER; note = uracil
  source 1..66: mol_type = other DNA
tgacaaggcgtagtcacggtnnnactnnntgatttaagtgacataccaatttgtacaacagttatc

SEQ ID NO: 1181 - DNA, 51 bp, synthetic construct
  misc_feature 1..51: note = Synthetic Primer
  misc_difference 21..23: note = n is a, c, g, t or u
  misc_difference 27..29: note = n is a, c, g, t or u
  modified_base 20: mod_base = OTHER; note = uracil
  modified_base 33..34: mod_base = OTHER; note = uracil
  modified_base 44: mod_base = OTHER; note = uracil
  modified_base 48..49: mod_base = OTHER; note = uracil
  source 1..51: mol_type = other DNA
tgacaaggcgtagtcacggtnnnactnnntgattgagcccacctgacttgg

SEQ ID NO: 1182 - DNA, 57 bp, synthetic construct
  misc_feature 1..57: note = Synthetic Primer
  misc_difference 21..23: note = n is a, c, g, t or u
  misc_difference 27..29: note = n is a, c, g, t or u
  modified_base 20: mod_base = OTHER; note = uracil
  modified_base 33..34: mod_base = OTHER; note = uracil
  modified_base 36: mod_base = OTHER; note = uracil
  modified_base 38..39: mod_base = OTHER; note = uracil
  modified_base 46: mod_base = OTHER; note = uracil
  modified_base 51: mod_base = OTHER; note = uracil
  modified_base 53..54: mod_base = OTHER; note = uracil
  source 1..57: mol_type = other DNA
tgacaaggcgtagtcacggtnnnactnnntgattctcttggaaactcccatcttgag

SEQ ID NO: 1183 - DNA, 60 bp, synthetic construct
  misc_feature 1..60: note = Synthetic Primer
  misc_difference 21..23: note = n is a, c, g, t or u
  misc_difference 27..29: note = n is a, c, g, t or u
  modified_base 20: mod_base = OTHER; note = uracil
  modified_base 33..35: mod_base = OTHER; note = uracil
  modified_base 37: mod_base = OTHER; note = uracil
  modified_base 39: mod_base = OTHER; note = uracil
  modified_base 46: mod_base = OTHER; note = uracil
  modified_base 51: mod_base = OTHER; note = uracil
  modified_base 55..59: mod_base = OTHER; note = uracil
  source 1..60: mol_type = other DNA
tgacaaggcgtagtcacggtnnnactnnntgatttgtgtggaagatccaatccatttttg

SEQ ID NO: 1184 - DNA, 63 bp, synthetic construct
  misc_feature 1..63: note = Synthetic Primer
  misc_difference 21..23: note = n is a, c, g, t or u
  misc_difference 27..29: note = n is a, c, g, t or u
  modified_base 20: mod_base = OTHER; note = uracil
  modified_base 33: mod_base = OTHER; note = uracil
  modified_base 43: mod_base = OTHER; note = uracil
  modified_base 48: mod_base = OTHER; note = uracil
  modified_base 50: mod_base = OTHER; note = uracil
  modified_base 52: mod_base = OTHER; note = uracil
  modified_base 54: mod_base = OTHER; note = uracil
  modified_base 56: mod_base = OTHER; note = uracil
  modified_base 60: mod_base = OTHER; note = uracil
  modified_base 62: mod_base = OTHER; note = uracil
  source 1..63: mol_type = other DNA
tgacaaggcgtagtcacggtnnnactnnntgatacaacccactgaggtatatgtataggtatt

SEQ ID NO: 1185 - DNA, 61 bp, synthetic construct
  misc_feature 1..61: note = Synthetic Primer
  misc_difference 21..23: note = n is a, c, g, t or u
  misc_difference 27..29: note = n is a, c, g, t or u
  modified_base 20: mod_base = OTHER; note = uracil
  modified_base 33: mod_base = OTHER; note = uracil
  modified_base 38: mod_base = OTHER; note = uracil
  modified_base 44..45: mod_base = OTHER; note = uracil
  modified_base 51: mod_base = OTHER; note = uracil
  modified_base 57: mod_base = OTHER; note = uracil
  modified_base 60: mod_base = OTHER; note = uracil
  source 1..61: mol_type = other DNA
tgacaaggcgtagtcacggtnnnactnnntgatcagctcagaattaaccataaaactggtg

SEQ ID NO: 1186 - DNA, 58 bp, synthetic construct
  misc_feature 1..58: note = Synthetic Primer
  misc_difference 21..23: note = n is a, c, g, t or u
  misc_difference 27..29: note = n is a, c, g, t or u
  modified_base 20: mod_base = OTHER; note = uracil
  modified_base 33: mod_base = OTHER; note = uracil
  modified_base 48: mod_base = OTHER; note = uracil
  modified_base 50..51: mod_base = OTHER; note = uracil
  modified_base 54: mod_base = OTHER; note = uracil
  source 1..58: mol_type = other DNA
tgacaaggcgtagtcacggtnnnactnnntgatgcacaccagaaaagtcttagtaacc

SEQ ID NO: 1187 - DNA, 65 bp, synthetic construct
  misc_feature 1..65: note = Synthetic Primer
  misc_difference 21..23: note = n is a, c, g, t or u
  misc_difference 27..29: note = n is a, c, g, t or u
  modified_base 20: mod_base = OTHER; note = uracil
  modified_base 33: mod_base = OTHER; note = uracil
  modified_base 36..37: mod_base = OTHER; note = uracil
  modified_base 40: mod_base = OTHER; note = uracil
  modified_base 42: mod_base = OTHER; note = uracil
  modified_base 44..45: mod_base = OTHER; note = uracil
  modified_base 47: mod_base = OTHER; note = uracil
  modified_base 50..52: mod_base = OTHER; note = uracil
  modified_base 64: mod_base = OTHER; note = uracil
  source 1..65: mol_type = other DNA
tgacaaggcgtagtcacggtnnnactnnntgatggttagtatgttatcatttgggaaaccaaatt

SEQ ID NO: 1188 - DNA, 65 bp, synthetic construct
  misc_feature 1..65: note = Synthetic Primer
  misc_difference 21..23: note = n is a, c, g, t or u
  misc_difference 27..29: note = n is a, c, g, t or u
  modified_base 20: mod_base = OTHER; note = uracil
  modified_base 33: mod_base = OTHER; note = uracil
  modified_base 41: mod_base = OTHER; note = uracil
  modified_base 43: mod_base = OTHER; note = uracil
  modified_base 51: mod_base = OTHER; note = uracil
  modified_base 54..56: mod_base = OTHER; note = uracil
  modified_base 61: mod_base = OTHER; note = uracil
  modified_base 64: mod_base = OTHER; note = uracil
  source 1..65: mol_type = other DNA
tgacaaggcgtagtcacggtnnnactnnntgataaaagaatatgaaaagatgatttgagatggtg

SEQ ID NO: 1189 - DNA, 66 bp, synthetic construct
  misc_feature 1..66: note = Synthetic Primer
  misc_difference 21..23: note = n is a, c, g, t or u
  misc_difference 27..29: note = n is a, c, g, t or u
  modified_base 20: mod_base = OTHER; note = uracil
  modified_base 33: mod_base = OTHER; note = uracil
  modified_base 35..36: mod_base = OTHER; note = uracil
  modified_base 38: mod_base = OTHER; note = uracil
  modified_base 40..41: mod_base = OTHER; note = uracil
  modified_base 47: mod_base = OTHER; note = uracil
  modified_base 50..51: mod_base = OTHER; note = uracil
  modified_base 56: mod_base = OTHER; note = uracil
  modified_base 58: mod_base = OTHER; note = uracil
  source 1..66: mol_type = other DNA
tgacaaggcgtagtcacggtnnnactnnntgatgttatattgaaaatgattaacatgtagaagggc

SEQ ID NO: 1190 - DNA, 61 bp, synthetic construct
  misc_feature 1..61: note = Synthetic Primer
  misc_difference 21..23: note = n is a, c, g, t or u
  misc_difference 27..29: note = n is a, c, g, t or u
  modified_base 20: mod_base = OTHER; note = uracil
  modified_base 33: mod_base = OTHER; note = uracil
  modified_base 39: mod_base = OTHER; note = uracil
  modified_base 47: mod_base = OTHER; note = uracil
  modified_base 50: mod_base = OTHER; note = uracil
  modified_base 52: mod_base = OTHER; note = uracil
  modified_base 54: mod_base = OTHER; note = uracil
  modified_base 56..57: mod_base = OTHER; note = uracil
  source 1..61: mol_type = other DNA
tgacaaggcgtagtcacggtnnnactnnntgatacacatgaagccatcgtatatattcaca

SEQ ID NO: 1191 - DNA, 57 bp, synthetic construct
  misc_feature 1..57: note = Synthetic Primer
  misc_difference 21..23: note = n is a, c, g, t or u
  misc_difference 27..29: note = n is a, c, g, t or u
  modified_base 20: mod_base = OTHER; note = uracil
  modified_base 33: mod_base = OTHER; note = uracil
  modified_base 40: mod_base = OTHER; note = uracil
  modified_base 44..46: mod_base = OTHER; note = uracil
  modified_base 53: mod_base = OTHER; note = uracil
  modified_base 55: mod_base = OTHER; note = uracil
  source 1..57: mol_type = other DNA
tgacaaggcgtagtcacggtnnnactnnntgatcagacgtcactttcaaacgtgtat

SEQ ID NO: 1192 - DNA, 60 bp, synthetic construct
  misc_feature 1..60: note = Synthetic Primer
  misc_difference 21..23: note = n is a, c, g, t or u
  misc_difference 27..29: note = n is a, c, g, t or u
  modified_base 20: mod_base = OTHER; note = uracil
  modified_base 33: mod_base = OTHER; note = uracil
  modified_base 36..37: mod_base = OTHER; note = uracil
  modified_base 39..40: mod_base = OTHER; note = uracil
  modified_base 42: mod_base = OTHER; note = uracil
  modified_base 47: mod_base = OTHER; note = uracil
  modified_base 53..54: mod_base = OTHER; note = uracil
  modified_base 56: mod_base = OTHER; note = uracil
  source 1..60: mol_type = other DNA
tgacaaggcgtagtcacggtnnnactnnntgatgattcttataaagtgcagcttctgcat

SEQ ID NO: 1193 - DNA, 56 bp, synthetic construct
  misc_feature 1..56: note = Synthetic Primer
  misc_difference 21..23: note = n is a, c, g, t or u
  misc_difference 27..29: note = n is a, c, g, t or u
  modified_base 20: mod_base = OTHER; note = uracil
  modified_base 33: mod_base = OTHER; note = uracil
  modified_base 35: mod_base = OTHER; note = uracil
  modified_base 37..39: mod_base = OTHER; note = uracil
  modified_base 41: mod_base = OTHER; note = uracil
  modified_base 49: mod_base = OTHER; note = uracil
  modified_base 54..55: mod_base = OTHER; note = uracil
  source 1..56: mol_type = other DNA
tgacaaggcgtagtcacggtnnnactnnntgatctgtttctgggaaactcccattt

SEQ ID NO: 1194 - DNA, 62 bp, synthetic construct
  misc_feature 1..62: note = Synthetic Primer
  misc_difference 21..23: note = n is a, c, g, t or u
  misc_difference 27..29: note = n is a, c, g, t or u
  modified_base 20: mod_base = OTHER; note = uracil
  modified_base 33..34: mod_base = OTHER; note = uracil
  modified_base 49: mod_base = OTHER; note = uracil
  modified_base 53: mod_base = OTHER; note = uracil
  modified_base 56..57: mod_base = OTHER; note = uracil
  modified_base 61: mod_base = OTHER; note = uracil
  source 1..62: mol_type = other DNA
tgacaaggcgtagtcacggtnnnactnnntgattggagagagaacaaataaatggttacctg

SEQ ID NO: 1195 - DNA, 53 bp, synthetic construct
  misc_feature 1..53: note = Synthetic Primer
  misc_difference 21..23: note = n is a, c, g, t or u
  misc_difference 27..29: note = n is a, c, g, t or u
  modified_base 20: mod_base = OTHER; note = uracil
  modified_base 33: mod_base = OTHER; note = uracil
  modified_base 38..40: mod_base = OTHER; note = uracil
  modified_base 44: mod_base = OTHER; note = uracil
  modified_base 49: mod_base = OTHER; note = uracil
  modified_base 52: mod_base = OTHER; note = uracil
  source 1..53: mol_type = other DNA
tgacaaggcgtagtcacggtnnnactnnntgatcggctttacctccaatggtg

SEQ ID NO: 1196 - DNA, 52 bp, synthetic construct
  misc_feature 1..52: note = Synthetic Primer
  misc_difference 21..23: note = n is a, c, g, t or u
  misc_difference 27..29: note = n is a, c, g, t or u
  modified_base 20: mod_base = OTHER; note = uracil
  modified_base 33: mod_base = OTHER; note = uracil
  modified_base 36: mod_base = OTHER; note = uracil
  modified_base 38: mod_base = OTHER; note = uracil
  source 1..52: mol_type = other DNA
tgacaaggcgtagtcacggtnnnactnnntgatgatctcccagagcaggacc

SEQ ID NO: 1197 - DNA, 52 bp, synthetic construct
  misc_feature 1..52: note = Synthetic Primer
  misc_difference 21..23: note = n is a, c, g, t or u
  misc_difference 27..29: note = n is a, c, g, t or u
  modified_base 20: mod_base = OTHER; note = uracil
  modified_base 33: mod_base = OTHER; note = uracil
  modified_base 35..37: mod_base = OTHER; note = uracil
  modified_base 39: mod_base = OTHER; note = uracil
  modified_base 41..42: mod_base = OTHER; note = uracil
  source 1..52: mol_type = other DNA
tgacaaggcgtagtcacggtnnnactnnntgatctttctcttccgcacccag

SEQ ID NO: 1198 - DNA, 54 bp, synthetic construct
  misc_feature 1..54: note = Synthetic Primer
  misc_difference 21..23: note = n is a, c, g, t or u
  misc_difference 27..29: note = n is a, c, g, t or u
  modified_base 20: mod_base = OTHER; note = uracil
  modified_base 33..35: mod_base = OTHER; note = uracil
  modified_base 37: mod_base = OTHER; note = uracil
  modified_base 39: mod_base = OTHER; note = uracil
  modified_base 51: mod_base = OTHER; note = uracil
  modified_base 53: mod_base = OTHER; note = uracil
  source 1..54: mol_type = other DNA
tgacaaggcgtagtcacggtnnnactnnntgatttctatcggcaaagcggtgtt

SEQ ID NO: 1199 - DNA, 56 bp, synthetic construct
  misc_feature 1..56: note = Synthetic Primer
  misc_difference 21..23: note = n is a, c, g, t or u
  misc_difference 27..29: note = n is a, c, g, t or u
  modified_base 20: mod_base = OTHER; note = uracil
  modified_base 33..34: mod_base = OTHER; note = uracil
  modified_base 40..41: mod_base = OTHER; note = uracil
  modified_base 43: mod_base = OTHER; note = uracil
  modified_base 49: mod_base = OTHER; note = uracil
  modified_base 55: mod_base = OTHER; note = uracil
  source 1..56: mol_type = other DNA
tgacaaggcgtagtcacggtnnnactnnntgattacagcttctcccagtaagcatc

SEQ ID NO: 1200 - DNA, 56 bp, synthetic construct
  misc_feature 1..56: note = Synthetic Primer
  misc_difference 21..23: note = n is a, c, g, t or u
  misc_difference 27..29: note = n is a, c, g, t or u
  modified_base 20: mod_base = OTHER; note = uracil
  modified_base 33: mod_base = OTHER; note = uracil
  modified_base 35: mod_base = OTHER; note = uracil
  modified_base 45: mod_base = OTHER; note = uracil
  modified_base 54: mod_base = OTHER; note = uracil
  source 1..56: mol_type = other DNA
tgacaaggcgtagtcacggtnnnactnnntgatctgacaccagatcagaaaggtct

SEQ ID NO: 1201 - DNA, 52 bp, synthetic construct
  misc_feature 1..52: note = Synthetic Primer
  misc_difference 21..23: note = n is a, c, g, t or u
  misc_difference 27..29: note = n is a, c, g, t or u
  modified_base 20: mod_base = OTHER; note = uracil
  modified_base 33..34: mod_base = OTHER; note = uracil
  modified_base 40: mod_base = OTHER; note = uracil
  modified_base 45: mod_base = OTHER; note = uracil
  modified_base 48: mod_base = OTHER; note = uracil
  source 1..52: mol_type = other DNA
tgacaaggcgtagtcacggtnnnactnnntgattccggctgcaatgatcagg

SEQ ID NO: 1202 - DNA, 50 bp, synthetic construct
  misc_feature 1..50: note = Synthetic Primer
  misc_difference 21..23: note = n is a, c, g, t or u
  misc_difference 27..29: note = n is a, c, g, t or u
  modified_base 20: mod_base = OTHER; note = uracil
  modified_base 33..34: mod_base = OTHER; note = uracil
  modified_base 36: mod_base = OTHER; note = uracil
  modified_base 38: mod_base = OTHER; note = uracil
  modified_base 49: mod_base = OTHER; note = uracil
  source 1..50: mol_type = other DNA
tgacaaggcgtagtcacggtnnnactnnntgattctctgggagggcactg

SEQ ID NO: 1203 - DNA, 59 bp, synthetic construct
  misc_feature 1..59: note = Synthetic Primer
  misc_difference 21..23: note = n is a, c, g, t or u
  misc_difference 27..29: note = n is a, c, g, t or u
  modified_base 20: mod_base = OTHER; note = uracil
  modified_base 33: mod_base = OTHER; note = uracil
  modified_base 35: mod_base = OTHER; note = uracil
  modified_base 37..38: mod_base = OTHER; note = uracil
  modified_base 48..51: mod_base = OTHER; note = uracil
  modified_base 55: mod_base = OTHER; note = uracil
  source 1..59: mol_type = other DNA
tgacaaggcgtagtcacggtnnnactnnntgatgtcttcccaacaaattttgggtgaaa

SEQ ID NO: 1204 - DNA, 50 bp, synthetic construct
  misc_feature 1..50: note = Synthetic Primer
  misc_difference 21..23: note = n is a, c, g, t or u
  misc_difference 27..29: note = n is a, c, g, t or u
  modified_base 20: mod_base = OTHER; note = uracil
  modified_base 33: mod_base = OTHER; note = uracil
  modified_base 45: mod_base = OTHER; note = uracil
  modified_base 47: mod_base = OTHER; note = uracil
  source 1..50: mol_type = other DNA
tgacaaggcgtagtcacggtnnnactnnntgatgcacacgcggatgtgca

SEQ ID NO: 1205 - DNA, 52 bp, synthetic construct
  misc_feature 1..52: note = Synthetic Primer
  misc_difference 21..23: note = n is a, c, g, t or u
  misc_difference 27..29: note = n is a, c, g, t or u
  modified_base 20: mod_base = OTHER; note = uracil
  modified_base 33: mod_base = OTHER; note = uracil
  modified_base 36: mod_base = OTHER; note = uracil
  modified_base 39..40: mod_base = OTHER; note = uracil
  modified_base 44: mod_base = OTHER; note = uracil
  modified_base 48..49: mod_base = OTHER; note = uracil
  modified_base 51: mod_base = OTHER; note = uracil
  source 1..52: mol_type = other DNA
tgacaaggcgtagtcacggtnnnactnnntgatagtccttgcgtgcattgtc

SEQ ID NO: 1206 - DNA, 54 bp, synthetic construct
  misc_feature 1..54: note = Synthetic Primer
  misc_difference 21..23: note = n is a, c, g, t or u
  misc_difference 27..29: note = n is a, c, g, t or u
  modified_base 20: mod_base = OTHER; note = uracil
  modified_base 33: mod_base = OTHER; note = uracil
  modified_base 35: mod_base = OTHER; note = uracil
  modified_base 38..40: mod_base = OTHER; note = uracil
  modified_base 50: mod_base = OTHER; note = uracil
  source 1..54: mol_type = other DNA
tgacaaggcgtagtcacggtnnnactnnntgatatgctttcaggaggcatccag

SEQ ID NO: 1207 - DNA, 51 bp, synthetic construct
  misc_feature 1..51: note = Synthetic Primer
  misc_difference 21..23: note = n is a, c, g, t or u
  misc_difference 27..29: note = n is a, c, g, t or u
  modified_base 20: mod_base = OTHER; note = uracil
  modified_base 33: mod_base = OTHER; note = uracil
  modified_base 35: mod_base = OTHER; note = uracil
  modified_base 37..38: mod_base = OTHER; note = uracil
  modified_base 44: mod_base = OTHER; note = uracil
  source 1..51: mol_type = other DNA
tgacaaggcgtagtcacggtnnnactnnntgatctcttgcgggtacccacg

SEQ ID NO: 1208 - DNA, 55 bp, synthetic construct
  misc_feature 1..55: note = Synthetic Primer
  misc_difference 21..23: note = n is a, c, g, t or u
  misc_difference 27..29: note = n is a, c, g, t or u
  modified_base 20: mod_base = OTHER; note = uracil
  modified_base 33: mod_base = OTHER; note = uracil
  modified_base 45: mod_base = OTHER; note = uracil
  modified_base 54: mod_base = OTHER; note = uracil
  source 1..55: mol_type = other DNA
tgacaaggcgtagtcacggtnnnactnnntgatcacaagaacagtgcagagggtt

SEQ ID NO: 1209 - DNA, 55 bp, synthetic construct
  misc_feature 1..55: note = Synthetic Primer
  misc_difference 21..23: note = n is a, c, g, t or u
  misc_difference 27..29: note = n is a, c, g, t or u
  modified_base 20: mod_base = OTHER; note = uracil
  modified_base 33: mod_base = OTHER; note = uracil
  modified_base 35..37: mod_base = OTHER; note = uracil
  modified_base 41: mod_base = OTHER; note = uracil
  modified_base 43..44: mod_base = OTHER; note = uracil
  source 1..55: mol_type = other DNA
tgacaaggcgtagtcacggtnnnactnnntgatctttcaatgttgccaccacact

SEQ ID NO: 1210 - DNA, 52 bp, synthetic construct
  misc_feature 1..52: note = Synthetic Primer
  misc_difference 21..23: note = n is a, c, g, t or u
  misc_difference 27..29: note = n is a, c, g, t or u
  modified_base 20: mod_base = OTHER; note = uracil
  modified_base 33: mod_base = OTHER; note = uracil
  modified_base 39: mod_base = OTHER; note = uracil
  modified_base 51: mod_base = OTHER; note = uracil
  source 1..52: mol_type = other DNA
tgacaaggcgtagtcacggtnnnactnnntgatccacatccaccgaggcatt

SEQ ID NO: 1211 - DNA, 54 bp, synthetic construct
  misc_feature 1..54: note = Synthetic Primer
  misc_difference 21..23: note = n is a, c, g, t or u
  misc_difference 27..29: note = n is a, c, g, t or u
  modified_base 20: mod_base = OTHER; note = uracil
  modified_base 33: mod_base = OTHER; note = uracil
  modified_base 40: mod_base = OTHER; note = uracil
  modified_base 46: mod_base = OTHER; note = uracil
  modified_base 50..51: mod_base = OTHER; note = uracil
  modified_base 53: mod_base = OTHER; note = uracil
  source 1..54: mol_type = other DNA
tgacaaggcgtagtcacggtnnnactnnntgatgcaggctggacgtacattctt

SEQ ID NO: 1212 - DNA, 54 bp, synthetic construct
  misc_feature 1..54: note = Synthetic Primer
  misc_difference 21..23: note = n is a, c, g, t or u
  misc_difference 27..29: note = n is a, c, g, t or u
  modified_base 20: mod_base = OTHER; note = uracil
  modified_base 33: mod_base = OTHER; note = uracil
  modified_base 35: mod_base = OTHER; note = uracil
  modified_base 39: mod_base = OTHER; note = uracil
  modified_base 41: mod_base = OTHER; note = uracil
  modified_base 47: mod_base = OTHER; note = uracil
  modified_base 50..51: mod_base = OTHER; note = uracil
  source 1..54: mol_type = other DNA
tgacaaggcgtagtcacggtnnnactnnntgatctccctctggaaatccttccg

SEQ ID NO: 1213 - DNA, 54 bp, synthetic construct
  misc_feature 1..54: note = Synthetic Primer
  misc_difference 21..23: note = n is a, c, g, t or u
  misc_difference 27..29: note = n is a, c, g, t or u
  modified_base 20: mod_base = OTHER; note = uracil
  modified_base 33: mod_base = OTHER; note = uracil
  modified_base 37: mod_base = OTHER; note = uracil
  modified_base 42: mod_base = OTHER; note = uracil
  modified_base 50: mod_base = OTHER; note = uracil
  modified_base 52..53: mod_base = OTHER; note = uracil
  source 1..54: mol_type = other DNA
tgacaaggcgtagtcacggtnnnactnnntgatccctcagctaccaggatgttt

SEQ ID NO: 1214 - DNA, 55 bp, synthetic construct
  misc_feature 1..55: note = Synthetic Primer
  misc_difference 21..23: note = n is a, c, g, t or u
  misc_difference 27..29: note = n is a, c, g, t or u
  modified_base 20: mod_base = OTHER; note = uracil
  modified_base 33..35: mod_base = OTHER; note = uracil
  modified_base 44: mod_base = OTHER; note = uracil
  modified_base 49..50: mod_base = OTHER; note = uracil
  modified_base 53: mod_base = OTHER; note = uracil
  source 1..55: mol_type = other DNA
tgacaaggcgtagtcacggtnnnactnnntgatttcaccagcgtcaagttgatgg

SEQ ID NO: 1215 - DNA, 51 bp, synthetic construct
  misc_feature 1..51: note = Synthetic Primer
  misc_difference 21..23: note = n is a, c, g, t or u
  misc_difference 27..29: note = n is a, c, g, t or u
  modified_base 20: mod_base = OTHER; note = uracil
  modified_base 33..34: mod_base = OTHER; note = uracil
  modified_base 38: mod_base = OTHER; note = uracil
  modified_base 40: mod_base = OTHER; note = uracil
  modified_base 42: mod_base = OTHER; note = uracil
  modified_base 44: mod_base = OTHER; note = uracil
  source 1..51: mol_type = other DNA
tgacaaggcgtagtcacggtnnnactnnntgattgggtctctgtgagggca

SEQ ID NO: 1216 - DNA, 53 bp, synthetic construct
  misc_feature 1..53: note = Synthetic Primer
  misc_difference 21..23: note = n is a, c, g, t or u
  misc_difference 27..29: note = n is a, c, g, t or u
  modified_base 20: mod_base = OTHER; note = uracil
  modified_base 33: mod_base = OTHER; note = uracil
  modified_base 35: mod_base = OTHER; note = uracil
  modified_base 41..42: mod_base = OTHER; note = uracil
  modified_base 45: mod_base = OTHER; note = uracil
  modified_base 51: mod_base = OTHER; note = uracil
  source 1..53: mol_type = other DNA
tgacaaggcgtagtcacggtnnnactnnntgatctggacgttgatgccactga

SEQ ID NO: 1217 - DNA, 51 bp, synthetic construct
  misc_feature 1..51: note = Synthetic Primer
  misc_difference 21..23: note = n is a, c, g, t or u
  misc_difference 27..29: note = n is a, c, g, t or u
  modified_base 20: mod_base = OTHER; note = uracil
  modified_base 33: mod_base = OTHER; note = uracil
  modified_base 35: mod_base = OTHER; note = uracil
  modified_base 42: mod_base = OTHER; note = uracil
  source 1..51: mol_type = other DNA
tgacaaggcgtagtcacggtnnnactnnntgatgtgagggctgacgcagag

SEQ ID NO: 1218 - DNA, 52 bp, synthetic construct
  misc_feature 1..52: note = Synthetic Primer
  misc_difference 21..23: note = n is a, c, g, t or u
  misc_difference 27..29: note = n is a, c, g, t or u
  modified_base 20: mod_base = OTHER; note = uracil
  modified_base 33..34: mod_base = OTHER; note = uracil
  modified_base 36: mod_base = OTHER; note = uracil
  modified_base 38: mod_base = OTHER; note = uracil
  modified_base 46: mod_base = OTHER; note = uracil
  modified_base 48: mod_base = OTHER; note = uracil
  modified_base 50: mod_base = OTHER; note = uracil
  source 1..52: mol_type = other DNA
tgacaaggcgtagtcacggtnnnactnnntgattgtgtccacacctgtgtcc

SEQ ID NO: 1219 - DNA, 59 bp, synthetic construct
  misc_feature 1..59: note = Synthetic Primer
  misc_difference 21..23: note = n is a, c, g, t or u
  misc_difference 27..29: note = n is a, c, g, t or u
  modified_base 20: mod_base = OTHER; note = uracil
  modified_base 33: mod_base = OTHER; note = uracil
  modified_base 35: mod_base = OTHER; note = uracil
  modified_base 37: mod_base = OTHER; note = uracil
  modified_base 42..43: mod_base = OTHER; note = uracil
  modified_base 45..46: mod_base = OTHER; note = uracil
  modified_base 48: mod_base = OTHER; note = uracil
  modified_base 50: mod_base = OTHER; note = uracil
  modified_base 55: mod_base = OTHER; note = uracil
  source 1..59: mol_type = other DNA
tgacaaggcgtagtcacggtnnnactnnntgatctatcacattgttctctccaatgcag

SEQ ID NO: 1220 - DNA, 53 bp, synthetic construct
  misc_feature 1..53: note = Synthetic Primer
  misc_difference 21..23: note = n is a, c, g, t or u
  misc_difference 27..29: note = n is a, c, g, t or u
  modified_base 20: mod_base = OTHER; note = uracil
  modified_base 33: mod_base = OTHER; note = uracil
  modified_base 37: mod_base = OTHER; note = uracil
  modified_base 43: mod_base = OTHER; note = uracil
  modified_base 50: mod_base = OTHER; note = uracil
  modified_base 52: mod_base = OTHER; note = uracil
  source 1..53: mol_type = other DNA
tgacaaggcgtagtcacggtnnnactnnntgatcaatcgcggtagaggctgtc

SEQ ID NO: 1221 - DNA, 52 bp, synthetic construct
  misc_feature 1..52: note = Synthetic Primer
  misc_difference 21..23: note = n is a, c, g, t or u
  misc_difference 27..29: note = n is a, c, g, t or u
  modified_base 20: mod_base = OTHER; note = uracil
  modified_base 33: mod_base = OTHER; note = uracil
  modified_base 41: mod_base = OTHER; note = uracil
  modified_base 50..51: mod_base = OTHER; note = uracil
  source 1..52: mol_type = other DNA
tgacaaggcgtagtcacggtnnnactnnntgatcagcgaatgggcagcattg

SEQ ID NO: 1222 - DNA, 55 bp, synthetic construct
  misc_feature 1..55: note = Synthetic Primer
  misc_difference 21..23: note = n is a, c, g, t or u
  misc_difference 27..29: note = n is a, c, g, t or u
  modified_base 20: mod_base = OTHER; note = uracil
  modified_base 33: mod_base = OTHER; note = uracil
  modified_base 43: mod_base = OTHER; note = uracil
  modified_base 48: mod_base = OTHER; note = uracil
  modified_base 54: mod_base = OTHER; note = uracil
  source 1..55: mol_type = other DNA
tgacaaggcgtagtcacggtnnnactnnntgatcgagccccctaaagtgaagatc

SEQ ID NO: 1223 - DNA, 54 bp, synthetic construct
  misc_feature 1..54: note = Synthetic Primer
  misc_difference 21..23: note = n is a, c, g, t or u
  misc_difference 27..29: note = n is a, c, g, t or u
  modified_base 20: mod_base = OTHER; note = uracil
  modified_base 33: mod_base = OTHER; note = uracil
  modified_base 38: mod_base = OTHER; note = uracil
  modified_base 41: mod_base = OTHER; note = uracil
  modified_base 45: mod_base = OTHER; note = uracil
  modified_base 52: mod_base = OTHER; note = uracil
  source 1..54: mol_type = other DNA
tgacaaggcgtagtcacggtnnnactnnntgatgcagtgatgcctaccaactgt

SEQ ID NO: 1224 - DNA, 55 bp, synthetic construct
  misc_feature 1..55: note = Synthetic Primer
  misc_difference 21..23: note = n is a, c, g, t or u
  misc_difference 27..29: note = n is a, c, g, t or u
  modified_base 20: mod_base = OTHER; note = uracil
  modified_base 33: mod_base = OTHER; note = uracil
  modified_base 37: mod_base = OTHER; note = uracil
  modified_base 39: mod_base = OTHER; note = uracil
  modified_base 41: mod_base = OTHER; note = uracil
  modified_base 47: mod_base = OTHER; note = uracil
  modified_base 50: mod_base = OTHER; note = uracil
  modified_base 52: mod_base = OTHER; note = uracil
  source 1..55: mol_type = other DNA
tgacaaggcgtagtcacggtnnnactnnntgatggctatctccaggtagtctggg

SEQ ID NO: 1225 - DNA, 55 bp, synthetic construct
  misc_feature 1..55: note = Synthetic Primer
  misc_difference 21..23: note = n is a, c, g, t or u
  misc_difference 27..29: note = n is a, c, g, t or u
  modified_base 20: mod_base = OTHER; note = uracil
  modified_base 33: mod_base = OTHER; note = uracil
  modified_base 40: mod_base = OTHER; note = uracil
  modified_base 44: mod_base = OTHER; note = uracil
  modified_base 48..49: mod_base = OTHER; note = uracil
  modified_base 52: mod_base = OTHER; note = uracil
  source 1..55: mol_type = other DNA
tgacaaggcgtagtcacggtnnnactnnntgatacagcatacatgcattcctcag

SEQ ID NO: 1226 - DNA, 52 bp, synthetic construct
  misc_feature 1..52: note = Synthetic Primer
  misc_difference 21..23: note = n is a, c, g, t or u
  misc_difference 27..29: note = n is a, c, g, t or u
  modified_base 20: mod_base = OTHER; note = uracil
  modified_base 33: mod_base = OTHER; note = uracil
  modified_base 37: mod_base = OTHER; note = uracil
  modified_base 45: mod_base = OTHER; note = uracil
  modified_base 48..49: mod_base = OTHER; note = uracil
  source 1..52: mol_type = other DNA
tgacaaggcgtagtcacggtnnnactnnntgatcagtgggcaggtccttcaa

SEQ ID NO: 1227 - DNA, 64 bp, synthetic construct
  misc_feature 1..64: note = Synthetic Primer
  misc_difference 21..23: note = n is a, c, g, t or u
  misc_difference 27..29: note = n is a, c, g, t or u
  modified_base 20: mod_base = OTHER; note = uracil
  modified_base 33: mod_base = OTHER; note = uracil
  modified_base 37: mod_base = OTHER; note = uracil
  modified_base 39: mod_base = OTHER; note = uracil
  modified_base 44: mod_base = OTHER; note = uracil
  modified_base 46: mod_base = OTHER; note = uracil
  modified_base 48: mod_base = OTHER; note = uracil
  modified_base 62..63: mod_base = OTHER; note = uracil
  source 1..64: mol_type = other DNA
tgacaaggcgtagtcacggtnnnactnnntgatgggtatggcatatatccaagagaaaagattt

SEQ ID NO: 1228 - DNA, 59 bp, synthetic construct
  misc_feature 1..59: note = Synthetic Primer
  misc_difference 21..23: note = n is a, c, g, t or u
  misc_difference 27..29: note = n is a, c, g, t or u
  modified_base 20: mod_base = OTHER; note = uracil
  modified_base 33: mod_base = OTHER; note = uracil
  modified_base 35: mod_base = OTHER; note = uracil
  modified_base 39: mod_base = OTHER; note = uracil
  modified_base 47: mod_base = OTHER; note = uracil
  modified_base 52: mod_base = OTHER; note = uracil
  modified_base 57: mod_base = OTHER; note = uracil
  source 1..59: mol_type = other DNA
tgacaaggcgtagtcacggtnnnactnnntgatataaatcagggagtcagatggagtgg

SEQ ID NO: 1229 - DNA, 55 bp, synthetic construct
  misc_feature 1..55: note = Synthetic Primer
  misc_difference 21..23: note = n is a, c, g, t or u
  misc_difference 27..29: note = n is a, c, g, t or u
  modified_base 20: mod_base = OTHER; note = uracil
  modified_base 33: mod_base = OTHER; note = uracil
  modified_base 35: mod_base = OTHER; note = uracil
  modified_base 37..38: mod_base = OTHER; note = uracil
  modified_base 41: mod_base = OTHER; note = uracil
  modified_base 46..47: mod_base = OTHER; note = uracil
  modified_base 49: mod_base = OTHER; note = uracil
  modified_base 52: mod_base = OTHER; note = uracil
  source 1..55: mol_type = other DNA
tgacaaggcgtagtcacggtnnnactnnntgatatcttcatcacgttgtcctcgg

SEQ ID NO: 1230 - DNA, 60 bp, synthetic construct
  misc_feature 1..60: note = Synthetic Primer
  misc_difference 21..23: note = n is a, c, g, t or u
  misc_difference 27..29: note = n is a, c, g, t or u
  modified_base 20: mod_base = OTHER; note = uracil
  modified_base 33: mod_base = OTHER; note = uracil
  modified_base 39: mod_base = OTHER; note = uracil
  modified_base 41..43: mod_base = OTHER; note = uracil
  modified_base 46: mod_base = OTHER; note = uracil
  modified_base 55: mod_base = OTHER; note = uracil
  modified_base 58: mod_base = OTHER; note = uracil
  source 1..60: mol_type = other DNA
tgacaaggcgtagtcacggtnnnactnnntgatggaaatgtttcctagacaaactcgtca

SEQ ID NO: 1231 - DNA, 54 bp, synthetic construct
  misc_feature 1..54: note = Synthetic Primer
  misc_difference 21..23: note = n is a, c, g, t or u
  misc_difference 27..29: note = n is a, c, g, t or u
  modified_base 20: mod_base = OTHER; note = uracil
  modified_base 33: mod_base = OTHER; note = uracil
  modified_base 36: mod_base = OTHER; note = uracil
  modified_base 39: mod_base = OTHER; note = uracil
  modified_base 43: mod_base = OTHER; note = uracil
  modified_base 45: mod_base = OTHER; note = uracil
  modified_base 49: mod_base = OTHER; note = uracil
  modified_base 53: mod_base = OTHER; note = uracil
  source 1..54: mol_type = other DNA
tgacaaggcgtagtcacggtnnnactnnntgatcctgctcagtgtagctaggtt

SEQ ID NO: 1232 - DNA, 52 bp, synthetic construct
  misc_feature 1..52: note = Synthetic Primer
  misc_difference 21..23: note = n is a, c, g, t or u
  misc_difference 27..29: note = n is a, c, g, t or u
  modified_base 20: mod_base = OTHER; note = uracil
  modified_base 33: mod_base = OTHER; note = uracil
  modified_base 36: mod_base = OTHER; note = uracil
  modified_base 44: mod_base = OTHER; note = uracil
  source 1..52: mol_type = other DNA
tgacaaggcgtagtcacggtnnnactnnntgatcatcggaacctgcacacag

SEQ ID NO: 1233 - DNA, 50 bp, synthetic construct
  misc_feature 1..50: note = Synthetic Primer
  misc_difference 21..23: note = n is a, c, g, t or u
  misc_difference 27..29: note = n is a, c, g, t or u
  modified_base 20: mod_base = OTHER; note = uracil
  modified_base 33: mod_base = OTHER; note = uracil
  modified_base 37: mod_base = OTHER; note = uracil
  modified_base 40: mod_base = OTHER; note = uracil
  source 1..50: mol_type = other DNA
tgacaaggcgtagtcacggtnnnactnnntgataagtcctgccgagcact

SEQ ID NO: 1234 - DNA, 56 bp, synthetic construct
  misc_feature 1..56: note = Synthetic Primer
  misc_difference 21..23: note = n is a, c, g, t or u
  misc_difference 27..29: note = n is a, c, g, t or u
  modified_base 20: mod_base = OTHER; note = uracil
  modified_base 33: mod_base = OTHER; note = uracil
  modified_base 37: mod_base = OTHER; note = uracil
  modified_base 40: mod_base = OTHER; note = uracil
  modified_base 43: mod_base = OTHER; note = uracil
  modified_base 45: mod_base = OTHER; note = uracil
  modified_base 51: mod_base = OTHER; note = uracil
  source 1..56: mol_type = other DNA
tgacaaggcgtagtcacggtnnnactnnntgatagatgatgatctccaggtacagg

SEQ ID NO: 1235 - DNA, 57 bp, synthetic construct
  misc_feature 1..57: note = Synthetic Primer
  misc_difference 21..23: note = n is a, c, g, t or u
  misc_difference 27..29: note = n is a, c, g, t or u
  modified_base 20: mod_base = OTHER; note = uracil
  modified_base 33..34: mod_base = OTHER; note = uracil
  modified_base 36: mod_base = OTHER; note = uracil
  modified_base 39: mod_base = OTHER; note = uracil
  modified_base 41: mod_base = OTHER; note = uracil
  modified_base 43: mod_base = OTHER; note = uracil
  modified_base 50: mod_base = OTHER; note = uracil
  modified_base 52: mod_base = OTHER; note = uracil
  source 1..57: mol_type = other DNA
tgacaaggcgtagtcacggtnnnactnnntgattatgctatctgagccgtctagact

SEQ ID NO: 1236 - DNA, 50 bp, synthetic construct
  misc_feature 1..50: note = Synthetic Primer
  misc_difference 21..23: note = n is a, c, g, t or u
  misc_difference 27..29: note = n is a, c, g, t or u
  modified_base 20: mod_base = OTHER; note = uracil
  modified_base 33: mod_base = OTHER; note = uracil
  modified_base 37: mod_base = OTHER; note = uracil
  modified_base 41: mod_base = OTHER; note = uracil
  modified_base 44: mod_base = OTHER; note = uracil
  modified_base 49: mod_base = OTHER; note = uracil
  source 1..50: mol_type = other DNA
tgacaaggcgtagtcacggtnnnactnnntgatagctgcatggtgcggtt

SEQ ID NO: 1237 - DNA, 52 bp, synthetic construct
  misc_feature 1..52: note = Synthetic Primer
  misc_difference 21..23: note = n is a, c, g, t or u
  misc_difference 27..29: note = n is a, c, g, t or u
  modified_base 20: mod_base = OTHER; note = uracil
  modified_base 33: mod_base = OTHER; note = uracil
  modified_base 45: mod_base = OTHER; note = uracil
  modified_base 47: mod_base = OTHER; note = uracil
  source 1..52: mol_type = other DNA
tgacaaggcgtagtcacggtnnnactnnntgatcaaagcagccctctcccag

SEQ ID NO: 1238 - DNA, 56 bp, synthetic construct
  misc_feature 1..56: note = Synthetic Primer
  misc_difference 21..23: note = n is a, c, g, t or u
  misc_difference 27..29: note = n is a, c, g, t or u
  modified_base 20: mod_base = OTHER; note = uracil
  modified_base 33: mod_base = OTHER; note = uracil
  modified_base 37: mod_base = OTHER; note = uracil
  modified_base 40..41: mod_base = OTHER; note = uracil
  modified_base 44: mod_base = OTHER; note = uracil
  modified_base 48: mod_base = OTHER; note = uracil
  modified_base 50: mod_base = OTHER; note = uracil
  modified_base 52: mod_base = OTHER; note = uracil
  source 1..56: mol_type = other DNA
tgacaaggcgtagtcacggtnnnactnnntgatccatccttcatagctgtatgcac

SEQ ID NO: 1239 - DNA, 53 bp, synthetic construct
  misc_feature 1..53: note = Synthetic Primer
  misc_difference 21..23: note = n is a, c, g, t or u
  misc_difference 27..29: note = n is a, c, g, t or u
  modified_base 20: mod_base = OTHER; note = uracil
  modified_base 33: mod_base = OTHER; note = uracil
  modified_base 35: mod_base = OTHER; note = uracil
  modified_base 38: mod_base = OTHER; note = uracil
  modified_base 43: mod_base = OTHER; note = uracil
  modified_base 48..49: mod_base = OTHER; note = uracil
  source 1..53: mol_type = other DNA
tgacaaggcgtagtcacggtnnnactnnntgatctcgtacggtcaggttgacg

SEQ ID NO: 1240 - DNA, 57 bp, synthetic construct
  misc_feature 1..57: note = Synthetic Primer
  misc_difference 21..23: note = n is a, c, g, t or u
  misc_difference 27..29: note = n is a, c, g, t or u
  modified_base 20: mod_base = OTHER; note = uracil
  modified_base 33: mod_base = OTHER; note = uracil
  modified_base 36: mod_base = OTHER; note = uracil
  modified_base 39: mod_base = OTHER; note = uracil
  modified_base 41: mod_base = OTHER; note = uracil
  modified_base 45: mod_base = OTHER; note = uracil
  modified_base 47: mod_base = OTHER; note = uracil
  source 1..57: mol_type = other DNA
tgacaaggcgtagtcacggtnnnactnnntgatcatcatctccatctcagacaccag

SEQ ID NO: 1241 - DNA, 55 bp, synthetic construct
  misc_feature 1..55: note = Synthetic Primer
  misc_difference 21..23: note = n is a, c, g, t or u
  misc_difference 27..29: note = n is a, c, g, t or u
  modified_base 20: mod_base = OTHER; note = uracil
  modified_base 33..34: mod_base = OTHER; note = uracil
  modified_base 37: mod_base = OTHER; note = uracil
  modified_base 44: mod_base = OTHER; note = uracil
  modified_base 49..50: mod_base = OTHER; note = uracil
  modified_base 54: mod_base = OTHER; note = uracil
  source 1..55: mol_type = other DNA
tgacaaggcgtagtcacggtnnnactnnntgattcctccacagtgaggttaggtg

SEQ ID NO: 1242 - DNA, 55 bp, synthetic construct
  misc_feature 1..55: note = Synthetic Primer
  misc_difference 21..23: note = n is a, c, g, t or u
  misc_difference 27..29: note = n is a, c, g, t or u
  modified_base 20: mod_base = OTHER; note = uracil
  modified_base 33: mod_base = OTHER; note = uracil
  modified_base 38: mod_base = OTHER; note = uracil
  modified_base 42: mod_base = OTHER; note = uracil
  modified_base 44: mod_base = OTHER; note = uracil
  modified_base 47: mod_base = OTHER; note = uracil
  modified_base 50: mod_base = OTHER; note = uracil
  modified_base 53: mod_base = OTHER; note = uracil
  source 1..55: mol_type = other DNA
tgacaaggcgtagtcacggtnnnactnnntgataccatcggtgtcatcctcatca

SEQ ID NO: 1243 - DNA, 53 bp, synthetic construct
  misc_feature 1..53: note = Synthetic Primer
  misc_difference 21..23: note = n is a, c, g, t or u
  misc_difference 27..29: note = n is a, c, g, t or u
  modified_base 20: mod_base = OTHER; note = uracil
  modified_base 33..34: mod_base = OTHER; note = uracil
  modified_base 36: mod_base = OTHER; note = uracil
  modified_base 38..39: mod_base = OTHER; note = uracil
  modified_base 45: mod_base = OTHER; note = uracil
  modified_base 48: mod_base = OTHER; note = uracil
  modified_base 50..51: mod_base = OTHER; note = uracil
  source 1..53: mol_type = other DNA
tgacaaggcgtagtcacggtnnnactnnntgattgtcttcaggctgatgttgc

SEQ ID NO: 1244 - DNA, 51 bp, synthetic construct
  misc_feature 1..51: note = Synthetic Primer
  misc_difference 21..23: note = n is a, c, g, t or u
  misc_difference 27..29: note = n is a, c, g, t or u
  modified_base 20: mod_base = OTHER; note = uracil
  modified_base 33: mod_base = OTHER; note = uracil
  modified_base 37..40: mod_base = OTHER; note = uracil
  modified_base 42: mod_base = OTHER; note = uracil
  modified_base 48: mod_base = OTHER; note = uracil
  source 1..51: mol_type = other DNA
tgacaaggcgtagtcacggtnnnactnnntgatgccttttgtccggctcct

SEQ ID NO: 1245 - DNA, 52 bp, synthetic construct
  misc_feature 1..52: note = Synthetic Primer
  misc_difference 21..23: note = n is a, c, g, t or u
  misc_difference 27..29: note = n is a, c, g, t or u
  modified_base 20: mod_base = OTHER; note = uracil
  modified_base 33: mod_base = OTHER; note = uracil
  modified_base 37: mod_base = OTHER; note = uracil
  modified_base 51: mod_base = OTHER; note = uracil
  source 1..52: mol_type = other DNA
tgacaaggcgtagtcacggtnnnactnnntgatcgctccaaaacacgacctt

SEQ ID NO: 1246 - DNA, 52 bp, synthetic construct
  misc_feature 1..52: note = Synthetic Primer
  misc_difference 21..23: note = n is a, c, g, t or u
  misc_difference 27..29: note = n is a, c, g, t or u
  modified_base 20: mod_base = OTHER; note = uracil
  modified_base 33: mod_base = OTHER; note = uracil
  modified_base 37: mod_base = OTHER; note = uracil
  modified_base 44: mod_base = OTHER; note = uracil
  modified_base 48: mod_base = OTHER; note = uracil
  modified_base 51: mod_base = OTHER; note = uracil
  source 1..52: mol_type = other DNA
tgacaaggcgtagtcacggtnnnactnnntgatgactcggccctgagtgata

SEQ ID NO: 1247 - DNA, 54 bp, synthetic construct
  misc_feature 1..54: note = Synthetic Primer
  misc_difference 21..23: note = n is a, c, g, t or u
  misc_difference 27..29: note = n is a, c, g, t or u
  modified_base 20: mod_base = OTHER; note = uracil
  modified_base 33: mod_base = OTHER; note = uracil
  modified_base 35: mod_base = OTHER; note = uracil
  modified_base 40..41: mod_base = OTHER; note = uracil
  modified_base 45: mod_base = OTHER; note = uracil
  source 1..54: mol_type = other DNA
tgacaaggcgtagtcacggtnnnactnnntgatctacacttggctgggcaaaga

SEQ ID NO: 1248 - DNA, 56 bp, synthetic construct
  misc_feature 1..56: note = Synthetic Primer
  misc_difference 21..23: note = n is a, c, g, t or u
  misc_difference 27..29: note = n is a, c, g, t or u
  modified_base 20: mod_base = OTHER; note = uracil
  modified_base 33..34: mod_base = OTHER; note = uracil
  modified_base 47..48: mod_base = OTHER; note = uracil
  modified_base 53: mod_base = OTHER; note = uracil
  source 1..56: mol_type = other DNA
tgacaaggcgtagtcacggtnnnactnnntgattgacaggaagaccttgaggtaga

SEQ ID NO: 1249 - DNA, 56 bp, synthetic construct
  misc_feature 1..56: note = Synthetic Primer
  misc_difference 21..23: note = n is a, c, g, t or u
  misc_difference 27..29: note = n is a, c, g, t or u
  modified_base 20: mod_base = OTHER; note = uracil
  modified_base 33: mod_base = OTHER; note = uracil
  modified_base 37: mod_base = OTHER; note = uracil
  modified_base 39: mod_base = OTHER; note = uracil
  modified_base 41: mod_base = OTHER; note = uracil
  modified_base 44: mod_base = OTHER; note = uracil
  modified_base 52: mod_base = OTHER; note = uracil
  source 1..56: mol_type = other DNA
tgacaaggcgtagtcacggtnnnactnnntgataggtctgtcctcaaggaatggat

SEQ ID NO: 1250 - DNA, 58 bp, synthetic construct
  misc_feature 1..58: note = Synthetic Primer
  misc_difference 21..23: note = n is a, c, g, t or u
  misc_difference 27..29: note = n is a, c, g, t or u
  modified_base 20: mod_base = OTHER; note = uracil
  modified_base 33: mod_base = OTHER; note = uracil
  modified_base 41: mod_base = OTHER; note = uracil
  modified_base 43..46: mod_base = OTHER; note = uracil
  modified_base 48: mod_base = OTHER; note = uracil
  modified_base 50: mod_base = OTHER; note = uracil
  modified_base 53: mod_base = OTHER; note = uracil
  modified_base 55: mod_base = OTHER; note = uracil
  source 1..58: mol_type = other DNA
tgacaaggcgtagtcacggtnnnactnnntgatacggcgatattttgtctgatgtagg

SEQ ID NO: 1251 - DNA, 50 bp, synthetic construct
  misc_feature 1..50: note = Synthetic Primer
  misc_difference 21..23: note = n is a, c, g, t or u
  misc_difference 27..29: note = n is a, c, g, t or u
  modified_base 20: mod_base = OTHER; note = uracil
  modified_base 33..34: mod_base = OTHER; note = uracil
  modified_base 41: mod_base = OTHER; note = uracil
  modified_base 47: mod_base = OTHER; note = uracil
  source 1..50: mol_type = other DNA
tgacaaggcgtagtcacggtnnnactnnntgattggccgctccaactcac

SEQ ID NO: 1252 - DNA, 53 bp, synthetic construct
  misc_feature 1..53: note = Synthetic Primer
  misc_difference 21..23: note = n is a, c, g, t or u
  misc_difference 27..29: note = n is a, c, g, t or u
  modified_base 20: mod_base = OTHER; note = uracil
  modified_base 33: mod_base = OTHER; note = uracil
  modified_base 43: mod_base = OTHER; note = uracil
  modified_base 49: mod_base = OTHER; note = uracil
  modified_base 51: mod_base = OTHER; note = uracil
  source 1..53: mol_type = other DNA
tgacaaggcgtagtcacggtnnnactnnntgatcgcccagagtgaagatctcc

SEQ ID NO: 1253 - DNA, 57 bp, synthetic construct
  misc_feature 1..57: note = Synthetic Primer
  misc_difference 21..23: note = n is a, c, g, t or u
  misc_difference 27..29: note = n is a, c, g, t or u
  modified_base 20: mod_base = OTHER; note = uracil
  modified_base 33..35: mod_base = OTHER; note = uracil
  modified_base 50: mod_base = OTHER; note = uracil
  source 1..57: mol_type = other DNA
tgacaaggcgtagtcacggtnnnactnnntgatttaccaaaaggcaaaatcccacca

SEQ ID NO: 1254 - DNA, 58 bp, synthetic construct
  misc_feature 1..58: note = Synthetic Primer
  misc_difference 21..23: note = n is a, c, g, t or u
  misc_difference 27..29: note = n is a, c, g, t or u
  modified_base 20: mod_base = OTHER; note = uracil
  modified_base 33..34: mod_base = OTHER; note = uracil
  modified_base 38..40: mod_base = OTHER; note = uracil
  modified_base 42: mod_base = OTHER; note = uracil
  modified_base 47: mod_base = OTHER; note = uracil
  modified_base 52: mod_base = OTHER; note = uracil
  modified_base 54: mod_base = OTHER; note = uracil
  source 1..58: mol_type = other DNA
tgacaaggcgtagtcacggtnnnactnnntgattccatttctgagatcaggtctgaca

SEQ ID NO: 1255 - DNA, 57 bp, synthetic construct
  misc_feature 1..57: note = Synthetic Primer
  misc_difference 21..23: note = n is a, c, g, t or u
  misc_difference 27..29: note = n is a, c, g, t or u
  modified_base 20: mod_base = OTHER; note = uracil
  modified_base 33: mod_base = OTHER; note = uracil
  modified_base 36..39: mod_base = OTHER; note = uracil
  modified_base 44: mod_base = OTHER; note = uracil
  modified_base 47..48: mod_base = OTHER; note = uracil
  modified_base 53..54: mod_base = OTHER; note = uracil
  source 1..57: mol_type = other DNA
tgacaaggcgtagtcacggtnnnactnnntgatcattttgagatgcttgcaattgcc

SEQ ID NO: 1256 - DNA, 54 bp, synthetic construct
  misc_feature 1..54: note = Synthetic Primer
  misc_difference 21..23: note = n is a, c, g, t or u
  misc_difference 27..29: note = n is a, c, g, t or u
  modified_base 20: mod_base = OTHER; note = uracil
  modified_base 33: mod_base = OTHER; note = uracil
  modified_base 37: mod_base = OTHER; note = uracil
  modified_base 50: mod_base = OTHER; note = uracil
  modified_base 52: mod_base = OTHER; note = uracil
  source 1..54: mol_type = other DNA
tgacaaggcgtagtcacggtnnnactnnntgatgggtagcagacaaacctgtgg

SEQ ID NO: 1257 - DNA, 56 bp, synthetic construct
  misc_feature 1..56: note = Synthetic Primer
  misc_difference 21..23: note = n is a, c, g, t or u
  misc_difference 27..29: note = n is a, c, g, t or u
  modified_base 20: mod_base = OTHER; note = uracil
  modified_base 33: mod_base = OTHER; note = uracil
  modified_base 35: mod_base = OTHER; note = uracil
  modified_base 40..41: mod_base = OTHER; note = uracil
  modified_base 47: mod_base = OTHER; note = uracil
  modified_base 49: mod_base = OTHER; note = uracil
  modified_base 52..54: mod_base = OTHER; note = uracil
  source 1..56: mol_type = other DNA
tgacaaggcgtagtcacggtnnnactnnntgatgtcacattcaggatgtgctttcg

SEQ ID NO: 1258 - DNA, 58 bp, synthetic construct
  misc_feature 1..58: note = Synthetic Primer
  misc_difference 21..23: note = n is a, c, g, t or u
  misc_difference 27..29: note = n is a, c, g, t or u
  modified_base 20: mod_base = OTHER; note = uracil
  modified_base 33: mod_base = OTHER; note = uracil
  modified_base 36: mod_base = OTHER; note = uracil
  modified_base 40: mod_base = OTHER; note = uracil
  modified_base 45..47: mod_base = OTHER; note = uracil
  modified_base 49..52: mod_base = OTHER; note = uracil
  modified_base 56: mod_base = OTHER; note = uracil
  source 1..58: mol_type = other DNA
tgacaaggcgtagtcacggtnnnactnnntgatactgcatgcaatttcttttccatct

SEQ ID NO: 1259 - DNA, 57 bp, synthetic construct
  misc_feature 1..57: note = Synthetic Primer
  misc_difference 21..23: note = n is a, c, g, t or u
  misc_difference 27..29: note = n is a, c, g, t or u
  modified_base 20: mod_base = OTHER; note = uracil
  modified_base 33..35: mod_base = OTHER; note = uracil
  modified_base 39..40: mod_base = OTHER; note = uracil
  modified_base 45: mod_base = OTHER; note = uracil
  modified_base 47..48: mod_base = OTHER; note = uracil
  modified_base 50: mod_base = OTHER; note = uracil
  modified_base 52: mod_base = OTHER; note = uracil
  modified_base 55: mod_base = OTHER; note = uracil
  source 1..57: mol_type = other DNA
tgacaaggcgtagtcacggtnnnactnnntgatttcacttccaatattctctgctgc

SEQ ID NO: 1260 - DNA, 53 bp, synthetic construct
  misc_feature 1..53: note = Synthetic Primer
  misc_difference 21..23: note = n is a, c, g, t or u
  misc_difference 27..29: note = n is a, c, g, t or u
  modified_base 20: mod_base = OTHER; note = uracil
  modified_base 33..35: mod_base = OTHER; note = uracil
  modified_base 37: mod_base = OTHER; note = uracil
  modified_base 41..42: mod_base = OTHER; note = uracil
  modified_base 51: mod_base = OTHER; note = uracil
  source 1..53: mol_type = other DNA
tgacaaggcgtagtcacggtnnnactnnntgatttctcgcttcagcacgatgt

SEQ ID NO: 1261 - DNA, 50 bp, synthetic construct
  misc_feature 1..50: note = Synthetic Primer
  misc_difference 21..23: note = n is a, c, g, t or u
  misc_difference 27..29: note = n is a, c, g, t or u
  modified_base 20: mod_base = OTHER; note = uracil
  modified_base 33: mod_base = OTHER; note = uracil
  modified_base 38: mod_base = OTHER; note = uracil
  modified_base 41: mod_base = OTHER; note = uracil
  modified_base 43: mod_base = OTHER; note = uracil
  source 1..50: mol_type = other DNA
tgacaaggcgtagtcacggtnnnactnnntgatcccatcctctggagcca

SEQ ID NO: 1262 - DNA, 53 bp, synthetic construct
  misc_feature 1..53: note = Synthetic Primer
  misc_difference 21..23: note = n is a, c, g, t or u
  misc_difference 27..29: note = n is a, c, g, t or u
  modified_base 20: mod_base = OTHER; note = uracil
  modified_base 33: mod_base = OTHER; note = uracil
  modified_base 36..37: mod_base = OTHER; note = uracil
  modified_base 39: mod_base = OTHER; note = uracil
  modified_base 43: mod_base = OTHER; note = uracil
  modified_base 46..47: mod_base = OTHER; note = uracil
  source 1..53: mol_type = other DNA
tgacaaggcgtagtcacggtnnnactnnntgatccttgtccctccttcaaggg

SEQ ID NO: 1263 - DNA, 53 bp, synthetic construct
  misc_feature 1..53: note = Synthetic Primer
  misc_difference 21..23: note = n is a, c, g, t or u
  misc_difference 27..29: note = n is a, c, g, t or u
  modified_base 20: mod_base = OTHER; note = uracil
  modified_base 33..34: mod_base = OTHER; note = uracil
  modified_base 36: mod_base = OTHER; note = uracil
  modified_base 40: mod_base = OTHER; note = uracil
  modified_base 45: mod_base = OTHER; note = uracil
  source 1..53: mol_type = other DNA
tgacaaggcgtagtcacggtnnnactnnntgattataggtccggtggacaggg

SEQ ID NO: 1264 - DNA, 51 bp, synthetic construct
  misc_feature 1..51: note = Synthetic Primer
  misc_difference 21..23: note = n is a, c, g, t or u
  misc_difference 27..29: note = n is a, c, g, t or u
  modified_base 20: mod_base = OTHER; note = uracil
  modified_base 33: mod_base = OTHER; note = uracil
  modified_base 35: mod_base = OTHER; note = uracil
  modified_base 37: mod_base = OTHER; note = uracil
  source 1..51: mol_type = other DNA
tgacaaggcgtagtcacggtnnnactnnntgatctgtagggacacagggca

SEQ ID NO: 1265 - DNA, 53 bp, synthetic construct
  misc_feature 1..53: note = Synthetic Primer
  misc_difference 21..23: note = n is a, c, g, t or u
  misc_difference 27..29: note = n is a, c, g, t or u
  modified_base 20: mod_base = OTHER; note = uracil
  modified_base 33: mod_base = OTHER; note = uracil
  modified_base 35: mod_base = OTHER; note = uracil
  modified_base 38: mod_base = OTHER; note = uracil
  modified_base 41: mod_base = OTHER; note = uracil
  modified_base 46..47: mod_base = OTHER; note = uracil
  source 1..53: mol_type = other DNA
tgacaaggcgtagtcacggtnnnactnnntgatgtcatagtgggcttcagccg

SEQ ID NO: 1266 - DNA, 58 bp, synthetic construct
  misc_feature 1..58: note = Synthetic Primer
  misc_difference 21..23: note = n is a, c, g, t or u
  misc_difference 27..29: note = n is a, c, g, t or u
  modified_base 20: mod_base = OTHER; note = uracil
  modified_base 33: mod_base = OTHER; note = uracil
  modified_base 36..37: mod_base = OTHER; note = uracil
  modified_base 40..41: mod_base = OTHER; note = uracil
  modified_base 48..49: mod_base = OTHER; note = uracil
  modified_base 51..53: mod_base = OTHER; note = uracil
  modified_base 55: mod_base = OTHER; note = uracil
  source 1..58: mol_type = other DNA
tgacaaggcgtagtcacggtnnnactnnntgatagttggttgaacagttatttctgca

SEQ ID NO: 1267 - DNA, 50 bp, synthetic construct
  misc_feature 1..50: note = Synthetic Primer
  misc_difference 21..23: note = n is a, c, g, t or u
  misc_difference 27..29: note = n is a, c, g, t or u
  modified_base 20: mod_base = OTHER; note = uracil
  modified_base 33: mod_base = OTHER; note = uracil
  modified_base 38: mod_base = OTHER; note = uracil
  modified_base 46: mod_base = OTHER; note = uracil
  source 1..50: mol_type = other DNA
tgacaaggcgtagtcacggtnnnactnnntgatgagctgagcgcctggca

SEQ ID NO: 1268 - DNA, 52 bp, synthetic construct
  misc_feature 1..52: note = Synthetic Primer
  misc_difference 21..23: note = n is a, c, g, t or u
  misc_difference 27..29: note = n is a, c, g, t or u
  modified_base 20: mod_base = OTHER; note = uracil
  modified_base 33: mod_base = OTHER; note = uracil
  modified_base 35: mod_base = OTHER; note = uracil
  modified_base 42..43: mod_base = OTHER; note = uracil
  modified_base 46..47: mod_base = OTHER; note = uracil
  source 1..52: mol_type = other DNA
tgacaaggcgtagtcacggtnnnactnnntgatgtcaccccttccttggcac

SEQ ID NO: 1269 - DNA, 60 bp, synthetic construct
  misc_feature 1..60: note = Synthetic Primer
  misc_difference 21..23: note = n is a, c, g, t or u
  misc_difference 27..29: note = n is a, c, g, t or u
  modified_base 20: mod_base = OTHER; note = uracil
  modified_base 33: mod_base = OTHER; note = uracil
  modified_base 36: mod_base = OTHER; note = uracil
  modified_base 38..40: mod_base = OTHER; note = uracil
  modified_base 42: mod_base = OTHER; note = uracil
  modified_base 45..46: mod_base = OTHER; note = uracil
  modified_base 49: mod_base = OTHER; note = uracil
  modified_base 52..53: mod_base = OTHER; note = uracil
  modified_base 56: mod_base = OTHER; note = uracil
  modified_base 59: mod_base = OTHER; note = uracil
  source 1..60: mol_type = other DNA
tgacaaggcgtagtcacggtnnnactnnntgatgatctttgtgcttactccttcctagtt

SEQ ID NO: 1270 - DNA, 54 bp, synthetic construct
  misc_feature 1..54: note = Synthetic Primer
  misc_difference 21..23: note = n is a, c, g, t or u
  misc_difference 27..29: note = n is a, c, g, t or u
  modified_base 20: mod_base = OTHER; note = uracil
  modified_base 33: mod_base = OTHER; note = uracil
  modified_base 38: mod_base = OTHER; note = uracil
  modified_base 41: mod_base = OTHER; note = uracil
  modified_base 43..44: mod_base = OTHER; note = uracil
  modified_base 48: mod_base = OTHER; note = uracil
  source 1..54: mol_type = other DNA
tgacaaggcgtagtcacggtnnnactnnntgatcccctgctcttcaatacagcc

SEQ ID NO: 1271 - DNA, 51 bp, synthetic construct
  misc_feature 1..51: note = Synthetic Primer
  misc_difference 21..23: note = n is a, c, g, t or u
  misc_difference 27..29: note = n is a, c, g, t or u
  modified_base 20: mod_base = OTHER; note = uracil
  modified_base 33: mod_base = OTHER; note = uracil
  modified_base 35: mod_base = OTHER; note = uracil
  modified_base 40: mod_base = OTHER; note = uracil
  source 1..51: mol_type = other DNA
tgacaaggcgtagtcacggtnnnactnnntgatgtgggctcaggaaccgag

SEQ ID NO: 1272 - DNA, 62 bp, synthetic construct
  misc_feature 1..62: note = Synthetic Primer
  misc_difference 21..23: note = n is a, c, g, t or u
  misc_difference 27..29: note = n is a, c, g, t or u
  modified_base 20: mod_base = OTHER; note = uracil
  modified_base 33: mod_base = OTHER; note = uracil
  modified_base 36: mod_base = OTHER; note = uracil
  modified_base 38: mod_base = OTHER; note = uracil
  modified_base 41: mod_base = OTHER; note = uracil
  modified_base 46..47: mod_base = OTHER; note = uracil
  modified_base 52: mod_base = OTHER; note = uracil
  modified_base 54: mod_base = OTHER; note = uracil
  modified_base 56: mod_base = OTHER; note = uracil
  source 1..62: mol_type = other DNA
tgacaaggcgtagtcacggtnnnactnnntgatgctctggtagaattgacatatctcaacac

SEQ ID NO: 1273 - DNA, 56 bp, synthetic construct
  misc_feature 1..56: note = Synthetic Primer
  misc_difference 21..23: note = n is a, c, g, t or u
  misc_difference 27..29: note = n is a, c, g, t or u
  modified_base 20: mod_base = OTHER; note = uracil
  modified_base 33: mod_base = OTHER; note = uracil
  modified_base 35: mod_base = OTHER; note = uracil
  modified_base 41..43: mod_base = OTHER; note = uracil
  modified_base 52: mod_base = OTHER; note = uracil
  source 1..56: mol_type = other DNA
tgacaaggcgtagtcacggtnnnactnnntgatctgaggatttccagcaaataggg

SEQ ID NO: 1274 - DNA, 60 bp, synthetic construct
  misc_feature 1..60: note = Synthetic Primer
  misc_difference 21..23: note = n is a, c, g, t or u
  misc_difference 27..29: note = n is a, c, g, t or u
  modified_base 20: mod_base = OTHER; note = uracil
  modified_base 33: mod_base = OTHER; note = uracil
  modified_base 39..42: mod_base = OTHER; note = uracil
  modified_base 46: mod_base = OTHER; note = uracil
  modified_base 48: mod_base = OTHER; note = uracil
  modified_base 51: mod_base = OTHER; note = uracil
  modified_base 53..54: mod_base = OTHER; note = uracil
  modified_base 58..59: mod_base = OTHER; note = uracil
  source 1..60: mol_type = other DNA
tgacaaggcgtagtcacggtnnnactnnntgatgaagattttcaatctcctcttgggttg

SEQ ID NO: 1275 - DNA, 52 bp, synthetic construct
  misc_feature 1..52: note = Synthetic Primer
  misc_difference 21..23: note = n is a, c, g, t or u
  misc_difference 27..29: note = n is a, c, g, t or u
  modified_base 20: mod_base = OTHER; note = uracil
  modified_base 33: mod_base = OTHER; note = uracil
  modified_base 37: mod_base = OTHER; note = uracil
  modified_base 40..41: mod_base = OTHER; note = uracil
  modified_base 43: mod_base = OTHER; note = uracil
  source 1..52: mol_type = other DNA
tgacaaggcgtagtcacggtnnnactnnntgatggatccttgtccccaccat

SEQ ID NO: 1276 - DNA, 57 bp, synthetic construct
  misc_feature 1..57: note = Synthetic Primer
  misc_difference 21..23: note = n is a, c, g, t or u
  misc_difference 27..29: note = n is a, c, g, t or u
  modified_base 20: mod_base = OTHER; note = uracil
  modified_base 33: mod_base = OTHER; note = uracil
  modified_base 35: mod_base = OTHER; note = uracil
  modified_base 37..39: mod_base = OTHER; note = uracil
  modified_base 41: mod_base = OTHER; note = uracil
  modified_base 45: mod_base = OTHER; note = uracil
  modified_base 48: mod_base = OTHER; note = uracil
  modified_base 50..51: mod_base = OTHER; note = uracil
  modified_base 55: mod_base = OTHER; note = uracil
  source 1..57: mol_type = other DNA
tgacaaggcgtagtcacggtnnnactnnntgatctctttgtcggtggtattaactcc

SEQ ID NO: 1277 - DNA, 53 bp, synthetic construct
  misc_feature 1..53: note = Synthetic Primer
  misc_difference 21..23: note = n is a, c, g, t or u
  misc_difference 27..29: note = n is a, c, g, t or u
  modified_base 20: mod_base = OTHER; note = uracil
  modified_base 33: mod_base = OTHER; note = uracil
  modified_base 38: mod_base = OTHER; note = uracil
  modified_base 46..47: mod_base = OTHER; note = uracil
  modified_base 50: mod_base = OTHER; note = uracil
  source 1..53: mol_type = other DNA
tgacaaggcgtagtcacggtnnnactnnntgatcaggtggagaagttcctggt

SEQ ID NO: 1278 - DNA, 63 bp, synthetic construct
  misc_feature 1..63: note = Synthetic Primer
  misc_difference 21..23: note = n is a, c, g, t or u
  misc_difference 27..29: note = n is a, c, g, t or u
  modified_base 20: mod_base = OTHER; note = uracil
  modified_base 33: mod_base = OTHER; note = uracil
  modified_base 35: mod_base = OTHER; note = uracil
  modified_base 44..45: mod_base = OTHER; note = uracil
  modified_base 47: mod_base = OTHER; note = uracil
  modified_base 49: mod_base = OTHER; note = uracil
  modified_base 51: mod_base = OTHER; note = uracil
  modified_base 55..56: mod_base = OTHER; note = uracil
  source 1..63: mol_type = other DNA
tgacaaggcgtagtcacggtnnnactnnntgatgtacaacagattatctctgaattagagcga

SEQ ID NO: 1279 - DNA, 55 bp, synthetic construct
  misc_feature 1..55: note = Synthetic Primer
  misc_difference 21..23: note = n is a, c, g, t or u
  misc_difference 27..29: note = n is a, c, g, t or u
  modified_base 20: mod_base = OTHER; note = uracil
  modified_base 33: mod_base = OTHER; note = uracil
  modified_base 37: mod_base = OTHER; note = uracil
  modified_base 40..42: mod_base = OTHER; note = uracil
  modified_base 44: mod_base = OTHER; note = uracil
  modified_base 47..48: mod_base = OTHER; note = uracil
  modified_base 51: mod_base = OTHER; note = uracil
  modified_base 53: mod_base = OTHER; note = uracil
  source 1..55: mol_type = other DNA
tgacaaggcgtagtcacggtnnnactnnntgatgcatcgtttgtggttagtgtca

SEQ ID NO: 1280 - DNA, 55 bp, synthetic construct
  misc_feature 1..55: note = Synthetic Primer
  misc_difference 21..23: note = n is a, c, g, t or u
  misc_difference 27..29: note = n is a, c, g, t or u
  modified_base 20: mod_base = OTHER; note = uracil
  modified_base 33..36: mod_base = OTHER; note = uracil
  modified_base 38: mod_base = OTHER; note = uracil
  modified_base 43..44: mod_base = OTHER; note = uracil
  modified_base 47: mod_base = OTHER; note = uracil
  modified_base 49: mod_base = OTHER; note = uracil
  modified_base 54: mod_base = OTHER; note = uracil
  source 1..55: mol_type = other DNA
tgacaaggcgtagtcacggtnnnactnnntgattttctggcattgatctcggctt

SEQ ID NO: 1281 - DNA, 58 bp, synthetic construct
  misc_feature 1..58: note = Synthetic Primer
  misc_difference 21..23: note = n is a, c, g, t or u
  misc_difference 27..29: note = n is a, c, g, t or u
  modified_base 20: mod_base = OTHER; note = uracil
  modified_base 33: mod_base = OTHER; note = uracil
  modified_base 37: mod_base = OTHER; note = uracil
  modified_base 40: mod_base = OTHER; note = uracil
  modified_base 42: mod_base = OTHER; note = uracil
  modified_base 44: mod_base = OTHER; note = uracil
  modified_base 47: mod_base = OTHER; note = uracil
  modified_base 54: mod_base = OTHER; note = uracil
  modified_base 56: mod_base = OTHER; note = uracil
  source 1..58: mol_type = other DNA
tgacaaggcgtagtcacggtnnnactnnntgatcagtgctgtatcatcccaaatgtca

SEQ ID NO: 1282 - DNA, 66 bp, synthetic construct
  misc_feature 1..66: note = Synthetic Primer
  misc_difference 21..23: note = n is a, c, g, t or u
  misc_difference 27..29: note = n is a, c, g, t or u
  modified_base 20: mod_base = OTHER; note = uracil
  modified_base 33: mod_base = OTHER; note = uracil
  modified_base 39: mod_base = OTHER; note = uracil
  modified_base 42: mod_base = OTHER; note = uracil
  modified_base 45..46: mod_base = OTHER; note = uracil
  modified_base 48..51: mod_base = OTHER; note = uracil
  modified_base 57..60: mod_base = OTHER; note = uracil
  modified_base 62..65: mod_base = OTHER; note = uracil
  source 1..66: mol_type = other DNA
tgacaaggcgtagtcacggtnnnactnnntgatcaacatgctgattcttttcaacgttttattttc

SEQ ID NO: 1283 - DNA, 57 bp, synthetic construct
  misc_feature 1..57: note = Synthetic Primer
  misc_difference 21..23: note = n is a, c, g, t or u
  misc_difference 27..29: note = n is a, c, g, t or u
  modified_base 20: mod_base = OTHER; note = uracil
  modified_base 33..35: mod_base = OTHER; note = uracil
  modified_base 37: mod_base = OTHER; note = uracil
  modified_base 41..43: mod_base = OTHER; note = uracil
  modified_base 48..50: mod_base = OTHER; note = uracil
  source 1..57: mol_type = other DNA
tgacaaggcgtagtcacggtnnnactnnntgatttctggatttcagctttggaaagt

SEQ ID NO: 1284 - DNA, 53 bp, synthetic construct
  misc_feature 1..53: note = Synthetic Primer
  misc_difference 21..23: note = n is a, c, g, t or u
  misc_difference 27..29: note = n is a, c, g, t or u
  modified_base 20: mod_base = OTHER; note = uracil
  modified_base 33: mod_base = OTHER; note = uracil
  modified_base 35: mod_base = OTHER; note = uracil
  modified_base 37..38: mod_base = OTHER; note = uracil
  modified_base 47: mod_base = OTHER; note = uracil
  modified_base 50..51: mod_base = OTHER; note = uracil
  source 1..53: mol_type = other DNA
tgacaaggcgtagtcacggtnnnactnnntgatatgttgcacagcctccttgg

SEQ ID NO: 1285 - DNA, 52 bp, synthetic construct
  misc_feature 1..52: note = Synthetic Primer
  misc_difference 21..23: note = n is a, c, g, t or u
  misc_difference 27..29: note = n is a, c, g, t or u
  modified_base 20: mod_base = OTHER; note = uracil
  modified_base 33: mod_base = OTHER; note = uracil
  modified_base 35..36: mod_base = OTHER; note = uracil
  modified_base 42: mod_base = OTHER; note = uracil
  modified_base 46..48: mod_base = OTHER; note = uracil
  source 1..52: mol_type = other DNA
tgacaaggcgtagtcacggtnnnactnnntgatcttccccatccatttcggg

SEQ ID NO: 1286 - DNA, 53 bp, synthetic construct
  misc_feature 1..53: note = Synthetic Primer
  misc_difference 21..23: note = n is a, c, g, t or u
  misc_difference 27..29: note = n is a, c, g, t or u
  modified_base 20: mod_base = OTHER; note = uracil
  modified_base 33: mod_base = OTHER; note = uracil
  modified_base 45: mod_base = OTHER; note = uracil
  modified_base 47..48: mod_base = OTHER; note = uracil
  source 1..53: mol_type = other DNA
tgacaaggcgtagtcacggtnnnactnnntgatacggagaccactcttcacga

SEQ ID NO: 1287 - DNA, 51 bp, synthetic construct
  misc_feature 1..51: note = Synthetic Primer
  misc_difference 21..23: note = n is a, c, g, t or u
  misc_difference 27..29: note = n is a, c, g, t or u
  modified_base 20: mod_base = OTHER; note = uracil
  modified_base 33: mod_base = OTHER; note = uracil
  modified_base 39: mod_base = OTHER; note = uracil
  modified_base 41: mod_base = OTHER; note = uracil
  modified_base 44: mod_base = OTHER; note = uracil
  modified_base 47..49: mod_base = OTHER; note = uracil
  source 1..51: mol_type = other DNA
tgacaaggcgtagtcacggtnnnactnnntgatggcgatctcctcgtttgc

SEQ ID NO: 1288 - DNA, 57 bp, synthetic construct
  misc_feature 1..57: note = Synthetic Primer
  misc_difference 21..23: note = n is a, c, g, t or u
  misc_difference 27..29: note = n is a, c, g, t or u
  modified_base 20: mod_base = OTHER; note = uracil
  modified_base 33: mod_base = OTHER; note = uracil
  modified_base 36: mod_base = OTHER; note = uracil
  modified_base 41..42: mod_base = OTHER; note = uracil
  modified_base 47: mod_base = OTHER; note = uracil
  source 1..57: mol_type = other DNA
tgacaaggcgtagtcacggtnnnactnnntgataataaggttcacatcaggaagggt

SEQ ID NO: 1289 - DNA, 51 bp, synthetic construct
  misc_feature 1..51: note = Synthetic Primer
  misc_difference 21..23: note = n is a, c, g, t or u
  misc_difference 27..29: note = n is a, c, g, t or u
  modified_base 20: mod_base = OTHER; note = uracil
  modified_base 33..34: mod_base = OTHER; note = uracil
  modified_base 43: mod_base = OTHER; note = uracil
  modified_base 49: mod_base = OTHER; note = uracil
  source 1..51: mol_type = other DNA
tgacaaggcgtagtcacggtnnnactnnntgattcagcgcgatcagcatct

SEQ ID NO: 1290 - DNA, 57 bp, synthetic construct
  misc_feature 1..57: note = Synthetic Primer
  misc_difference 21..23: note = n is a, c, g, t or u
  misc_difference 27..29: note = n is a, c, g, t or u
  modified_base 20: mod_base = OTHER; note = uracil
  modified_base 33: mod_base = OTHER; note = uracil
  modified_base 36: mod_base = OTHER; note = uracil
  modified_base 38: mod_base = OTHER; note = uracil
  modified_base 40..41: mod_base = OTHER; note = uracil
  modified_base 44: mod_base = OTHER; note = uracil
  modified_base 46..47: mod_base = OTHER; note = uracil
  source 1..57: mol_type = other DNA
tgacaaggcgtagtcacggtnnnactnnntgatggtctattcctgttgaagcagcaa

SEQ ID NO: 1291 - DNA, 57 bp, synthetic construct
  misc_feature 1..57: note = Synthetic Primer
  misc_difference 21..23: note = n is a, c, g, t or u
  misc_difference 27..29: note = n is a, c, g, t or u
  modified_base 20: mod_base = OTHER; note = uracil
  modified_base 33..35: mod_base = OTHER; note = uracil
  modified_base 50: mod_base = OTHER; note = uracil
  modified_base 52..53: mod_base = OTHER; note = uracil
  modified_base 56: mod_base = OTHER; note = uracil
  source 1..57: mol_type = other DNA
tgacaaggcgtagtcacggtnnnactnnntgatttgcagaaggaacacctattcgtt

SEQ ID NO: 1292 - DNA, 55 bp, synthetic construct
  misc_feature 1..55: note = Synthetic Primer
  misc_difference 21..23: note = n is a, c, g, t or u
  misc_difference 27..29: note = n is a, c, g, t or u
  modified_base 20: mod_base = OTHER; note = uracil
  modified_base 33: mod_base = OTHER; note = uracil
  modified_base 38..39: mod_base = OTHER; note = uracil
  modified_base 43: mod_base = OTHER; note = uracil
  modified_base 47: mod_base = OTHER; note = uracil
  modified_base 52..54: mod_base = OTHER; note = uracil
  source 1..55: mol_type = other DNA
tgacaaggcgtagtcacggtnnnactnnntgatgaccttggctgcatgaagtttt

SEQ ID NO: 1293 - DNA, 56 bp, synthetic construct
  misc_feature 1..56: note = Synthetic Primer
  misc_difference 21..23: note = n is a, c, g, t or u
  misc_difference 27..29: note = n is a, c, g, t or u
  modified_base 20: mod_base = OTHER; note = uracil
  modified_base 33: mod_base = OTHER; note = uracil
  modified_base 36: mod_base = OTHER; note = uracil
  modified_base 39..40: mod_base = OTHER; note = uracil
  modified_base 42..43: mod_base = OTHER; note = uracil
  modified_base 46: mod_base = OTHER; note = uracil
  source 1..56: mol_type = other DNA
tgacaaggcgtagtcacggtnnnactnnntgataatgcttattcatggcaggacca

SEQ ID NO: 1294 - DNA, 59 bp, synthetic construct
  misc_feature 1..59: note = Synthetic Primer
  misc_difference 21..23: note = n is a, c, g, t or u
  misc_difference 27..29: note = n is a, c, g, t or u
  modified_base 20: mod_base = OTHER; note = uracil
  modified_base 33..34: mod_base = OTHER; note = uracil
  modified_base 36..37: mod_base = OTHER; note = uracil
  modified_base 39: mod_base = OTHER; note = uracil
  modified_base 44..46: mod_base = OTHER; note = uracil
  modified_base 53: mod_base = OTHER; note = uracil
  modified_base 56: mod_base = OTHER; note = uracil
  modified_base 58: mod_base = OTHER; note = uracil
  source 1..59: mol_type = other DNA
tgacaaggcgtagtcacggtnnnactnnntgattgttgtacactttgaggagtgatctg

SEQ ID NO: 1295 - DNA, 58 bp, synthetic construct
  misc_feature 1..58: note = Synthetic Primer
  misc_difference 21..23: note = n is a, c, g, t or u
  misc_difference 27..29: note = n is a, c, g, t or u
  modified_base 20: mod_base = OTHER; note = uracil
  modified_base 33: mod_base = OTHER; note = uracil
  modified_base 41: mod_base = OTHER; note = uracil
  modified_base 44..46: mod_base = OTHER; note = uracil
  modified_base 53: mod_base = OTHER; note = uracil
  modified_base 57: mod_base = OTHER; note = uracil
  source 1..58: mol_type = other DNA
tgacaaggcgtagtcacggtnnnactnnntgataaagagatcatttgccccatcaatt

SEQ ID NO: 1296 - DNA, 56 bp, synthetic construct
  misc_feature 1..56: note = Synthetic Primer
  misc_difference 21..23: note = n is a, c, g, t or u
  misc_difference 27..29: note = n is a, c, g, t or u
  modified_base 20: mod_base = OTHER; note = uracil
  modified_base 33: mod_base = OTHER; note = uracil
  modified_base 36: mod_base = OTHER; note = uracil
  modified_base 41: mod_base = OTHER; note = uracil
  modified_base 44: mod_base = OTHER; note = uracil
  modified_base 48: mod_base = OTHER; note = uracil
  modified_base 50: mod_base = OTHER; note = uracil
  modified_base 53: mod_base = OTHER; note = uracil
  source 1..56: mol_type = other DNA
tgacaaggcgtagtcacggtnnnactnnntgatggtgaactcctgcatgtcatcag

SEQ ID NO: 1297 - DNA, 57 bp, synthetic construct
  misc_feature 1..57: note = Synthetic Primer
  misc_difference 21..23: note = n is a, c, g, t or u
  misc_difference 27..29: note = n is a, c, g, t or u
  modified_base 20: mod_base = OTHER; note = uracil
  modified_base 33: mod_base = OTHER; note = uracil
  modified_base 35: mod_base = OTHER; note = uracil
  modified_base 38: mod_base = OTHER; note = uracil
  modified_base 44..45: mod_base = OTHER; note = uracil
  modified_base 48..51: mod_base = OTHER; note = uracil
  modified_base 53: mod_base = OTHER; note = uracil
  source 1..57: mol_type = other DNA
tgacaaggcgtagtcacggtnnnactnnntgatctggtccaacttcattttctgaga

SEQ ID NO: 1298 - DNA, 58 bp, synthetic construct
  misc_feature 1..58: note = Synthetic Primer
  misc_difference 21..23: note = n is a, c, g, t or u
  misc_difference 27..29: note = n is a, c, g, t or u
  modified_base 20: mod_base = OTHER; note = uracil
  modified_base 33: mod_base = OTHER; note = uracil
  modified_base 36: mod_base = OTHER; note = uracil
  modified_base 38: mod_base = OTHER; note = uracil
  modified_base 40: mod_base = OTHER; note = uracil
  modified_base 46..48: mod_base = OTHER; note = uracil
  modified_base 51: mod_base = OTHER; note = uracil
  modified_base 53: mod_base = OTHER; note = uracil
  modified_base 57: mod_base = OTHER; note = uracil
  source 1..58: mol_type = other DNA
tgacaaggcgtagtcacggtnnnactnnntgatactatctgcaggtttcatctgaatg

SEQ ID NO: 1299 - DNA, 50 bp, synthetic construct
  misc_feature 1..50: note = Synthetic Primer
  misc_difference 21..23: note = n is a, c, g, t or u
  misc_difference 27..29: note = n is a, c, g, t or u
  modified_base 20: mod_base = OTHER; note = uracil
  modified_base 33: mod_base = OTHER; note = uracil
  modified_base 41: mod_base = OTHER; note = uracil
  modified_base 47..48: mod_base = OTHER; note = uracil
  source 1..50: mol_type = other DNA
tgacaaggcgtagtcacggtnnnactnnntgatggccacctggaccttcc

SEQ ID NO: 1300 - DNA, 52 bp, synthetic construct
  misc_feature 1..52: note = Synthetic Primer
  misc_difference 21..23: note = n is a, c, g, t or u
  misc_difference 27..29: note = n is a, c, g, t or u
  modified_base 20: mod_base = OTHER; note = uracil
  modified_base 33..35: mod_base = OTHER; note = uracil
  modified_base 41: mod_base = OTHER; note = uracil
  modified_base 43: mod_base = OTHER; note = uracil
  modified_base 50: mod_base = OTHER; note = uracil
  source 1..52: mol_type = other DNA
tgacaaggcgtagtcacggtnnnactnnntgatttgagcgtgtgaagactgc

SEQ ID NO: 1301 - DNA, 57 bp, synthetic construct
  misc_feature 1..57: note = Synthetic Primer
  misc_difference 21..23: note = n is a, c, g, t or u
  misc_difference 27..29: note = n is a, c, g, t or u
  modified_base 20: mod_base = OTHER; note = uracil
  modified_base 33: mod_base = OTHER; note = uracil
  modified_base 40..42: mod_base = OTHER; note = uracil
  modified_base 44..45: mod_base = OTHER; note = uracil
  modified_base 49..51: mod_base = OTHER; note = uracil
  source 1..57: mol_type = other DNA
tgacaaggcgtagtcacggtnnnactnnntgatcccaggtttattaaatttcgcagc

SEQ ID NO: 1302 - DNA, 50 bp, synthetic construct
  misc_feature 1..50: note = Synthetic Primer
  misc_difference 21..23: note = n is a, c, g, t or u
  misc_difference 27..29: note = n is a, c, g, t or u
  modified_base 20: mod_base = OTHER; note = uracil
  modified_base 33: mod_base = OTHER; note = uracil
  modified_base 42: mod_base = OTHER; note = uracil
  modified_base 48: mod_base = OTHER; note = uracil
  source 1..50: mol_type = other DNA
tgacaaggcgtagtcacggtnnnactnnntgatggccagactgaccctcc

SEQ ID NO: 1303 - DNA, 54 bp, synthetic construct
  misc_feature 1..54: note = Synthetic Primer
  misc_difference 21..23: note = n is a, c, g, t or u
  misc_difference 27..29: note = n is a, c, g, t or u
  modified_base 20: mod_base = OTHER; note = uracil
  modified_base 33: mod_base = OTHER; note = uracil
  modified_base 37: mod_base = OTHER; note = uracil
  modified_base 39: mod_base = OTHER; note = uracil
  modified_base 41: mod_base = OTHER; note = uracil
  source 1..54: mol_type = other DNA
tgacaaggcgtagtcacggtnnnactnnntgatgaatatgtggaagcccacagc

SEQ ID NO: 1304 - DNA, 62 bp, synthetic construct
  misc_feature 1..62: note = Synthetic Primer
  misc_difference 21..23: note = n is a, c, g, t or u
  misc_difference 27..29: note = n is a, c, g, t or u
  modified_base 20: mod_base = OTHER; note = uracil
  modified_base 33: mod_base = OTHER; note = uracil
  modified_base 39: mod_base = OTHER; note = uracil
  modified_base 41..43: mod_base = OTHER; note = uracil
  modified_base 48: mod_base = OTHER; note = uracil
  modified_base 52..53: mod_base = OTHER; note = uracil
  modified_base 56..57: mod_base = OTHER; note = uracil
  source 1..62: mol_type = other DNA
tgacaaggcgtagtcacggtnnnactnnntgatggagatatttcacctgacttgattcaagg

SEQ ID NO: 1305 - DNA, 62 bp, synthetic construct
  misc_feature 1..62: note = Synthetic Primer
  misc_difference 21..23: note = n is a, c, g, t or u
  misc_difference 27..29: note = n is a, c, g, t or u
  modified_base 20: mod_base = OTHER; note = uracil
  modified_base 33: mod_base = OTHER; note = uracil
  modified_base 36..37: mod_base = OTHER; note = uracil
  modified_base 40: mod_base = OTHER; note = uracil
  modified_base 43..45: mod_base = OTHER; note = uracil
  modified_base 47: mod_base = OTHER; note = uracil
  modified_base 52..55: mod_base = OTHER; note = uracil
  modified_base 57: mod_base = OTHER; note = uracil
  modified_base 60..61: mod_base = OTHER; note = uracil
  source 1..62: mol_type = other DNA
tgacaaggcgtagtcacggtnnnactnnntgatcgttgatgatttctaaccttttctggttt

SEQ ID NO: 1306 - DNA, 51 bp, synthetic construct
  misc_feature 1..51: note = Synthetic Primer
  misc_difference 21..23: note = n is a, c, g, t or u
  misc_difference 27..29: note = n is a, c, g, t or u
  modified_base 20: mod_base = OTHER; note = uracil
  modified_base 33: mod_base = OTHER; note = uracil
  modified_base 37: mod_base = OTHER; note = uracil
  modified_base 46: mod_base = OTHER; note = uracil
  modified_base 49: mod_base = OTHER; note = uracil
  source 1..51: mol_type = other DNA
tgacaaggcgtagtcacggtnnnactnnntgatgcctccggaaggtcatct

SEQ ID NO: 1307 - DNA, 50 bp, synthetic construct
  misc_feature 1..50: note = Synthetic Primer
  misc_difference 21..23: note = n is a, c, g, t or u
  misc_difference 27..29: note = n is a, c, g, t or u
  modified_base 20: mod_base = OTHER; note = uracil
  modified_base 33: mod_base = OTHER; note = uracil
  modified_base 36: mod_base = OTHER; note = uracil
  modified_base 38: mod_base = OTHER; note = uracil
  modified_base 48: mod_base = OTHER; note = uracil
  source 1..50: mol_type = other DNA
tgacaaggcgtagtcacggtnnnactnnntgatcatctccaccgccgtgt

SEQ ID NO: 1308 - DNA, 57 bp, synthetic construct
  misc_feature 1..57: note = Synthetic Primer
  misc_difference 21..23: note = n is a, c, g, t or u
  misc_difference 27..29: note = n is a, c, g, t or u
  modified_base 20: mod_base = OTHER; note = uracil
  modified_base 33: mod_base = OTHER; note = uracil
  modified_base 35: mod_base = OTHER; note = uracil
  modified_base 42: mod_base = OTHER; note = uracil
  modified_base 47..48: mod_base = OTHER; note = uracil
  modified_base 56: mod_base = OTHER; note = uracil
  source 1..57: mol_type = other DNA
tgacaaggcgtagtcacggtnnnactnnntgatgtcacagctgcagttgaaaaagtt

SEQ ID NO: 1309 - DNA, 65 bp, synthetic construct
  misc_feature 1..65: note = Synthetic Primer
  misc_difference 21..23: note = n is a, c, g, t or u
  misc_difference 27..29: note = n is a, c, g, t or u
  modified_base 20: mod_base = OTHER; note = uracil
  modified_base 33..35: mod_base = OTHER; note = uracil
  modified_base 38: mod_base = OTHER; note = uracil
  modified_base 40..43: mod_base = OTHER; note = uracil
  modified_base 46..47: mod_base = OTHER; note = uracil
  modified_base 49..51: mod_base = OTHER; note = uracil
  modified_base 55: mod_base = OTHER; note = uracil
  modified_base 59: mod_base = OTHER; note = uracil
  source 1..65: mol_type = other DNA
tgacaaggcgtagtcacggtnnnactnnntgatttgctcttttgattctttaaatacatcaaagt

SEQ ID NO: 1310 - DNA, 52 bp, synthetic construct
  misc_feature 1..52: note = Synthetic Primer
  misc_difference 21..23: note = n is a, c, g, t or u
  misc_difference 27..29: note = n is a, c, g, t or u
  modified_base 20: mod_base = OTHER; note = uracil
  modified_base 33: mod_base = OTHER; note = uracil
  modified_base 39: mod_base = OTHER; note = uracil
  modified_base 48: mod_base = OTHER; note = uracil
  source 1..52: mol_type = other DNA
tgacaaggcgtagtcacggtnnnactnnntgatgccactccgcaggataaac

SEQ ID NO: 1311 - DNA, 59 bp, synthetic construct
  misc_feature 1..59: note = Synthetic Primer
  misc_difference 21..23: note = n is a, c, g, t or u
  misc_difference 27..29: note = n is a, c, g, t or u
  modified_base 20: mod_base = OTHER; note = uracil
  modified_base 33: mod_base = OTHER; note = uracil
  modified_base 36: mod_base = OTHER; note = uracil
  modified_base 43: mod_base = OTHER; note = uracil
  modified_base 46: mod_base = OTHER; note = uracil
  modified_base 49: mod_base = OTHER; note = uracil
  modified_base 53: mod_base = OTHER; note = uracil
  source 1..59: mol_type = other DNA
tgacaaggcgtagtcacggtnnnactnnntgatggtggaaagtaatagtcaatgggcaa

SEQ ID NO: 1312 - DNA, 56 bp, synthetic construct
  misc_feature 1..56: note = Synthetic Primer
  misc_difference 21..23: note = n is a, c, g, t or u
  misc_difference 27..29: note = n is a, c, g, t or u
  modified_base 20: mod_base = OTHER; note = uracil
  modified_base 33..34: mod_base = OTHER; note = uracil
  modified_base 36: mod_base = OTHER; note = uracil
  modified_base 40..42: mod_base = OTHER; note = uracil
  modified_base 44: mod_base = OTHER; note = uracil
  modified_base 48: mod_base = OTHER; note = uracil
  modified_base 50: mod_base = OTHER; note = uracil
  modified_base 54: mod_base = OTHER; note = uracil
  source 1..56: mol_type = other DNA
tgacaaggcgtagtcacggtnnnactnnntgattctacatttgtaggtgtggctgt

SEQ ID NO: 1313 - DNA, 56 bp, synthetic construct
  misc_feature 1..56: note = Synthetic Primer
  misc_difference 21..23: note = n is a, c, g, t or u
  misc_difference 27..29: note = n is a, c, g, t or u
  modified_base 20: mod_base = OTHER; note = uracil
  modified_base 33: mod_base = OTHER; note = uracil
  modified_base 37..38: mod_base = OTHER; note = uracil
  modified_base 41: mod_base = OTHER; note = uracil
  modified_base 45..48: mod_base = OTHER; note = uracil
  modified_base 51: mod_base = OTHER; note = uracil
  modified_base 53: mod_base = OTHER; note = uracil
  modified_base 55: mod_base = OTHER; note = uracil
  source 1..56: mol_type = other DNA
tgacaaggcgtagtcacggtnnnactnnntgatcgattcctggcttttcatctctt

SEQ ID NO: 1314 - DNA, 50 bp, synthetic construct
  misc_feature 1..50: note = Synthetic Primer
  misc_difference 21..23: note = n is a, c, g, t or u
  misc_difference 27..29: note = n is a, c, g, t or u
  modified_base 20: mod_base = OTHER; note = uracil
  modified_base 33..34: mod_base = OTHER; note = uracil
  modified_base 41: mod_base = OTHER; note = uracil
  modified_base 43: mod_base = OTHER; note = uracil
  modified_base 49: mod_base = OTHER; note = uracil
  source 1..50: mol_type = other DNA
tgacaaggcgtagtcacggtnnnactnnntgattcagggctctgcagctc

SEQ ID NO: 1315 - DNA, 56 bp, synthetic construct
  misc_feature 1..56: note = Synthetic Primer
  misc_difference 21..23: note = n is a, c, g, t or u
  misc_difference 27..29: note = n is a, c, g, t or u
  modified_base 20: mod_base = OTHER; note = uracil
  modified_base 33..34: mod_base = OTHER; note = uracil
  modified_base 36: mod_base = OTHER; note = uracil
  modified_base 46: mod_base = OTHER; note = uracil
  modified_base 49: mod_base = OTHER; note = uracil
  modified_base 51: mod_base = OTHER; note = uracil
  modified_base 53..54: mod_base = OTHER; note = uracil
  source 1..56: mol_type = other DNA
tgacaaggcgtagtcacggtnnnactnnntgattatggaggccaatgctctcttca

SEQ ID NO: 1316 - DNA, 55 bp, synthetic construct
  misc_feature 1..55: note = Synthetic Primer
  misc_difference 21..23: note = n is a, c, g, t or u
  misc_difference 27..29: note = n is a, c, g, t or u
  modified_base 20: mod_base = OTHER; note = uracil
  modified_base 33: mod_base = OTHER; note = uracil
  modified_base 37..38: mod_base = OTHER; note = uracil
  modified_base 41..42: mod_base = OTHER; note = uracil
  modified_base 48: mod_base = OTHER; note = uracil
  modified_base 50..51: mod_base = OTHER; note = uracil
  modified_base 54: mod_base = OTHER; note = uracil
  source 1..55: mol_type = other DNA
tgacaaggcgtagtcacggtnnnactnnntgatcgcttccttcagggtcttcatc

SEQ ID NO: 1317 - DNA, 51 bp, synthetic construct
  misc_feature 1..51: note = Synthetic Primer
  misc_difference 21..23: note = n is a, c, g, t or u
  misc_difference 27..29: note = n is a, c, g, t or u
  modified_base 20: mod_base = OTHER; note = uracil
  modified_base 33: mod_base = OTHER; note = uracil
  modified_base 38..39: mod_base = OTHER; note = uracil
  modified_base 41: mod_base = OTHER; note = uracil
  modified_base 43..44: mod_base = OTHER; note = uracil
  modified_base 50: mod_base = OTHER; note = uracil
  source 1..51: mol_type = other DNA
tgacaaggcgtagtcacggtnnnactnnntgatgggcttgtcttgaggctg

SEQ ID NO: 1318 - DNA, 57 bp, synthetic construct
  misc_feature 1..57: note = Synthetic Primer
  misc_difference 21..23: note = n is a, c, g, t or u
  misc_difference 27..29: note = n is a, c, g, t or u
  modified_base 20: mod_base = OTHER; note = uracil
  modified_base 33..34: mod_base = OTHER; note = uracil
  modified_base 36: mod_base = OTHER; note = uracil
  modified_base 38: mod_base = OTHER; note = uracil
  modified_base 40..41: mod_base = OTHER; note = uracil
  modified_base 45: mod_base = OTHER; note = uracil
  modified_base 50: mod_base = OTHER; note = uracil
  modified_base 53: mod_base = OTHER; note = uracil
  modified_base 56: mod_base = OTHER; note = uracil
  source 1..57: mol_type = other DNA
tgacaaggcgtagtcacggtnnnactnnntgattatctcttccataggctcctgctg

SEQ ID NO: 1319 - DNA, 51 bp, synthetic construct
  misc_feature 1..51: note = Synthetic Primer
  misc_difference 21..23: note = n is a, c, g, t or u
  misc_difference 27..29: note = n is a, c, g, t or u
  modified_base 20: mod_base = OTHER; note = uracil
  modified_base 33..34: mod_base = OTHER; note = uracil
  modified_base 43: mod_base = OTHER; note = uracil
  modified_base 47: mod_base = OTHER; note = uracil
  source 1..51: mol_type = other DNA
tgacaaggcgtagtcacggtnnnactnnntgattacccgaggtccctggag

SEQ ID NO: 1320 - DNA, 50 bp, synthetic construct
  misc_feature 1..50: note = Synthetic Primer
  misc_difference 21..23: note = n is a, c, g, t or u
  misc_difference 27..29: note = n is a, c, g, t or u
  modified_base 20: mod_base = OTHER; note = uracil
  modified_base 33: mod_base = OTHER; note = uracil
  modified_base 38: mod_base = OTHER; note = uracil
  modified_base 43: mod_base = OTHER; note = uracil
  modified_base 46: mod_base = OTHER; note = uracil
  modified_base 49: mod_base = OTHER; note = uracil
  source 1..50: mol_type = other DNA
tgacaaggcgtagtcacggtnnnactnnntgataggctccagtgctggtt

SEQ ID NO: 1321 - DNA, 55 bp, synthetic construct
  misc_feature 1..55: note = Synthetic Primer
  misc_difference 21..23: note = n is a, c, g, t or u
  misc_difference 27..29: note = n is a, c, g, t or u
  modified_base 20: mod_base = OTHER; note = uracil
  modified_base 33: mod_base = OTHER; note = uracil
  modified_base 36: mod_base = OTHER; note = uracil
  modified_base 40: mod_base = OTHER; note = uracil
  modified_base 47: mod_base = OTHER; note = uracil
  modified_base 49: mod_base = OTHER; note = uracil
  source 1..55: mol_type = other DNA
tgacaaggcgtagtcacggtnnnactnnntgatcctccctcaggactgtaacaga

SEQ ID NO: 1322 - DNA, 57 bp, synthetic construct
  misc_feature 1..57: note = Synthetic Primer
  misc_difference 21..23: note = n is a, c, g, t or u
  misc_difference 27..29: note = n is a, c, g, t or u
  modified_base 20: mod_base = OTHER; note = uracil
  modified_base 33..34: mod_base = OTHER; note = uracil
  modified_base 39..40: mod_base = OTHER; note = uracil
  modified_base 44: mod_base = OTHER; note = uracil
  modified_base 46: mod_base = OTHER; note = uracil
  modified_base 55: mod_base = OTHER; note = uracil
  source 1..57: mol_type = other DNA
tgacaaggcgtagtcacggtnnnactnnntgattggacttccatgtgcaaacactac

SEQ ID NO: 1323 - DNA, 59 bp, synthetic construct
  misc_feature 1..59: note = Synthetic Primer
  misc_difference 21..23: note = n is a, c, g, t or u
  misc_difference 27..29: note = n is a, c, g, t or u
  modified_base 20: mod_base = OTHER; note = uracil
  modified_base 33..34: mod_base = OTHER; note = uracil
  modified_base 37: mod_base = OTHER; note = uracil
  modified_base 40: mod_base = OTHER; note = uracil
  modified_base 43: mod_base = OTHER; note = uracil
  modified_base 46: mod_base = OTHER; note = uracil
  modified_base 49: mod_base = OTHER; note = uracil
  modified_base 52: mod_base = OTHER; note = uracil
  modified_base 55: mod_base = OTHER; note = uracil
  source 1..59: mol_type = other DNA
tgacaaggcgtagtcacggtnnnactnnntgattcatcatcatcatcatcatcctccga

SEQ ID NO: 1324 - DNA, 64 bp, synthetic construct
  misc_feature 1..64: note = Synthetic Primer
  misc_difference 21..23: note = n is a, c, g, t or u
  misc_difference 27..29: note = n is a, c, g, t or u
  modified_base 20: mod_base = OTHER; note = uracil
  modified_base 33: mod_base = OTHER; note = uracil
  modified_base 35..36: mod_base = OTHER; note = uracil
  modified_base 38: mod_base = OTHER; note = uracil
  modified_base 41: mod_base = OTHER; note = uracil
  modified_base 43: mod_base = OTHER; note = uracil
  modified_base 46..47: mod_base = OTHER; note = uracil
  modified_base 52: mod_base = OTHER; note = uracil
  modified_base 54..55: mod_base = OTHER; note = uracil
  modified_base 58..61: mod_base = OTHER; note = uracil
  source 1..64: mol_type = other DNA
tgacaaggcgtagtcacggtnnnactnnntgatattctgatctggttgaactattacttttcca

SEQ ID NO: 1325 - DNA, 53 bp, synthetic construct
  misc_feature 1..53: note = Synthetic Primer
  misc_difference 21..23: note = n is a, c, g, t or u
  misc_difference 27..29: note = n is a, c, g, t or u
  modified_base 20: mod_base = OTHER; note = uracil
  modified_base 33: mod_base = OTHER; note = uracil
  modified_base 35: mod_base = OTHER; note = uracil
  modified_base 40: mod_base = OTHER; note = uracil
  modified_base 43: mod_base = OTHER; note = uracil
  modified_base 45: mod_base = OTHER; note = uracil
  source 1..53: mol_type = other DNA
tgacaaggcgtagtcacggtnnnactnnntgatctgacctagtgtgagggagg

SEQ ID NO: 1326 - DNA, 56 bp, synthetic construct
  misc_feature 1..56: note = Synthetic Primer
  misc_difference 21..23: note = n is a, c, g, t or u
  misc_difference 27..29: note = n is a, c, g, t or u
  modified_base 20: mod_base = OTHER; note = uracil
  modified_base 33: mod_base = OTHER; note = uracil
  modified_base 37: mod_base = OTHER; note = uracil
  modified_base 39: mod_base = OTHER; note = uracil
  modified_base 41: mod_base = OTHER; note = uracil
  modified_base 45..46: mod_base = OTHER; note = uracil
  source 1..56: mol_type = other DNA
tgacaaggcgtagtcacggtnnnactnnntgataaatgtgtaaattgccgagcacg

SEQ ID NO: 1327 - DNA, 59 bp, synthetic construct
  misc_feature 1..59: note = Synthetic Primer
  misc_difference 21..23: note = n is a, c, g, t or u
  misc_difference 27..29: note = n is a, c, g, t or u
  modified_base 20: mod_base = OTHER; note = uracil
  modified_base 33: mod_base = OTHER; note = uracil
  modified_base 36: mod_base = OTHER; note = uracil
  modified_base 38..39: mod_base = OTHER; note = uracil
  modified_base 45..46: mod_base = OTHER; note = uracil
  modified_base 51: mod_base = OTHER; note = uracil
  source 1..59: mol_type = other DNA
tgacaaggcgtagtcacggtnnnactnnntgatcatcttcaaagttgcagtaaaaaccc

SEQ ID NO: 1328 - DNA, 59 bp, synthetic construct
  misc_feature 1..59: note = Synthetic Primer
  misc_difference 21..23: note = n is a, c, g, t or u
  misc_difference 27..29: note = n is a, c, g, t or u
  modified_base 20: mod_base = OTHER; note = uracil
  modified_base 33: mod_base = OTHER; note = uracil
  modified_base 38: mod_base = OTHER; note = uracil
  modified_base 41..43: mod_base = OTHER; note = uracil
  modified_base 47..49: mod_base = OTHER; note = uracil
  modified_base 51..52: mod_base = OTHER; note = uracil
  source 1..59: mol_type = other DNA
tgacaaggcgtagtcacggtnnnactnnntgatgagatagtttcactttcttcccagct

SEQ ID NO: 1329 - DNA, 53 bp, synthetic construct
  misc_feature 1..53: note = Synthetic Primer
  misc_difference 21..23: note = n is a, c, g, t or u
  misc_difference 27..29: note = n is a, c, g, t or u
  modified_base 20: mod_base = OTHER; note = uracil
  modified_base 33..34: mod_base = OTHER; note = uracil
  modified_base 48..49: mod_base = OTHER; note = uracil
  modified_base 51: mod_base = OTHER; note = uracil
  source 1..53: mol_type = other DNA
tgacaaggcgtagtcacggtnnnactnnntgattgcccaaagcaaccttctcc

SEQ ID NO: 1330 - DNA, 57 bp, synthetic construct
  misc_feature 1..57: note = Synthetic Primer
  misc_difference 21..23: note = n is a, c, g, t or u
  misc_difference 27..29: note = n is a, c, g, t or u
  modified_base 20: mod_base = OTHER; note = uracil
  modified_base 33: mod_base = OTHER; note = uracil
  modified_base 37: mod_base = OTHER; note = uracil
  modified_base 41..42: mod_base = OTHER; note = uracil
  modified_base 44: mod_base = OTHER; note = uracil
  modified_base 47: mod_base = OTHER; note = uracil
  modified_base 50: mod_base = OTHER; note = uracil
  modified_base 56: mod_base = OTHER; note = uracil
  source 1..57: mol_type = other DNA
tgacaaggcgtagtcacggtnnnactnnntgatgagtccattatgatgctccaggtg

SEQ ID NO: 1331 - DNA, 52 bp, synthetic construct
  misc_feature 1..52: note = Synthetic Primer
  misc_difference 21..23: note = n is a, c, g, t or u
  misc_difference 27..29: note = n is a, c, g, t or u
  modified_base 20: mod_base = OTHER; note = uracil
  modified_base 33: mod_base = OTHER; note = uracil
  modified_base 36..37: mod_base = OTHER; note = uracil
  modified_base 39: mod_base = OTHER; note = uracil
  modified_base 43..45: mod_base = OTHER; note = uracil
  modified_base 51: mod_base = OTHER; note = uracil
  source 1..52: mol_type = other DNA
tgacaaggcgtagtcacggtnnnactnnntgatccttgtggctttcagggtc

SEQ ID NO: 1332 - DNA, 51 bp, synthetic construct
  misc_feature 1..51: note = Synthetic Primer
  misc_difference 21..23: note = n is a, c, g, t or u
  misc_difference 27..29: note = n is a, c, g, t or u
  modified_base 20: mod_base = OTHER; note = uracil
  modified_base 33: mod_base = OTHER; note = uracil
  modified_base 40: mod_base = OTHER; note = uracil
  modified_base 42..43: mod_base = OTHER; note = uracil
  modified_base 50: mod_base = OTHER; note = uracil
  source 1..51: mol_type = other DNA
tgacaaggcgtagtcacggtnnnactnnntgatcacgactgttggaccgtg

SEQ ID NO: 1333 - DNA, 54 bp, synthetic construct
  misc_feature 1..54: note = Synthetic Primer
  misc_difference 21..23: note = n is a, c, g, t or u
  misc_difference 27..29: note = n is a, c, g, t or u
  modified_base 20: mod_base = OTHER; note = uracil
  modified_base 33: mod_base = OTHER; note = uracil
  modified_base 36: mod_base = OTHER; note = uracil
  modified_base 38..39: mod_base = OTHER; note = uracil
  modified_base 46: mod_base = OTHER; note = uracil
  modified_base 48: mod_base = OTHER; note = uracil
  modified_base 52: mod_base = OTHER; note = uracil
  source 1..54: mol_type = other DNA
tgacaaggcgtagtcacggtnnnactnnntgatcctcttcgaacctgtccatga

SEQ ID NO: 1334 - DNA, 50 bp, synthetic construct
  misc_feature 1..50: note = Synthetic Primer
  misc_difference 21..23: note = n is a, c, g, t or u
  misc_difference 27..29: note = n is a, c, g, t or u
  modified_base 20: mod_base = OTHER; note = uracil
  modified_base 33..34: mod_base = OTHER; note = uracil
  modified_base 36..37: mod_base = OTHER; note = uracil
  modified_base 42: mod_base = OTHER; note = uracil
  modified_base 44: mod_base = OTHER; note = uracil
  modified_base 48: mod_base = OTHER; note = uracil
  source 1..50: mol_type = other DNA
tgacaaggcgtagtcacggtnnnactnnntgattgttgcactgtgcctgg

SEQ ID NO: 1335 - DNA, 53 bp, synthetic construct
  misc_feature 1..53: note = Synthetic Primer
  misc_difference 21..23: note = n is a, c, g, t or u
  misc_difference 27..29: note = n is a, c, g, t or u
  modified_base 20: mod_base = OTHER; note = uracil
  modified_base 33: mod_base = OTHER; note = uracil
  modified_base 35: mod_base = OTHER; note = uracil
  modified_base 38..40: mod_base = OTHER; note = uracil
  source 1..53: mol_type = other DNA
tgacaaggcgtagtcacggtnnnactnnntgatatgatttgcaaagcgcacac

SEQ ID NO: 1336 - DNA, 57 bp, synthetic construct
  misc_feature 1..57: note = Synthetic Primer
  misc_difference 21..23: note = n is a, c, g, t or u
  misc_difference 27..29: note = n is a, c, g, t or u
  modified_base 20: mod_base = OTHER; note = uracil
  modified_base 33: mod_base = OTHER; note = uracil
  modified_base 35..38: mod_base = OTHER; note = uracil
  modified_base 41..42: mod_base = OTHER; note = uracil
  modified_base 45..47: mod_base = OTHER; note = uracil
  modified_base 49: mod_base = OTHER; note = uracil
  modified_base 56: mod_base = OTHER; note = uracil
  source 1..57: mol_type = other DNA
tgacaaggcgtagtcacggtnnnactnnntgatgttttccttcctttatcccaggtg

SEQ ID NO: 1337 - DNA, 50 bp, synthetic construct
  misc_feature 1..50: note = Synthetic Primer
  misc_difference 21..23: note = n is a, c, g, t or u
  misc_difference 27..29: note = n is a, c, g, t or u
  modified_base 20: mod_base = OTHER; note = uracil
  modified_base 33: mod_base = OTHER; note = uracil
  modified_base 44: mod_base = OTHER; note = uracil
  modified_base 47: mod_base = OTHER; note = uracil
  source 1..50: mol_type = other DNA
tgacaaggcgtagtcacggtnnnactnnntgatggcagcagggtggtgag

SEQ ID NO: 1338 - DNA, 53 bp, synthetic construct
  misc_feature 1..53: note = Synthetic Primer
  misc_difference 21..23: note = n is a, c, g, t or u
  misc_difference 27..29: note = n is a, c, g, t or u
  modified_base 20: mod_base = OTHER; note = uracil
  modified_base 33: mod_base = OTHER; note = uracil
  modified_base 35: mod_base = OTHER; note = uracil
  modified_base 37: mod_base = OTHER; note = uracil
  modified_base 39: mod_base = OTHER; note = uracil
  modified_base 41: mod_base = OTHER; note = uracil
  modified_base 43: mod_base = OTHER; note = uracil
  modified_base 45: mod_base = OTHER; note = uracil
  modified_base 50: mod_base = OTHER; note = uracil
  source 1..53: mol_type = other DNA
tgacaaggcgtagtcacggtnnnactnnntgatatgtctgtgtgtcccgtcaa

SEQ ID NO: 1339 - DNA, 58 bp, synthetic construct
  misc_feature 1..58: note = Synthetic Primer
  misc_difference 21..23: note = n is a, c, g, t or u
  misc_difference 27..29: note = n is a, c, g, t or u
  modified_base 20: mod_base = OTHER; note = uracil
  modified_base 33: mod_base = OTHER; note = uracil
  modified_base 39: mod_base = OTHER; note = uracil
  modified_base 44: mod_base = OTHER; note = uracil
  modified_base 46..48: mod_base = OTHER; note = uracil
  modified_base 53..54: mod_base = OTHER; note = uracil
  source 1..58: mol_type = other DNA
tgacaaggcgtagtcacggtnnnactnnntgatcaagctcagatatttgggcttcaag

SEQ ID NO: 1340 - DNA, 54 bp, synthetic construct
  misc_feature 1..54: note = Synthetic Primer
  misc_difference 21..23: note = n is a, c, g, t or u
  misc_difference 27..29: note = n is a, c, g, t or u
  modified_base 20: mod_base = OTHER; note = uracil
  modified_base 33: mod_base = OTHER; note = uracil
  modified_base 35: mod_base = OTHER; note = uracil
  modified_base 38: mod_base = OTHER; note = uracil
  modified_base 41..42: mod_base = OTHER; note = uracil
  modified_base 49: mod_base = OTHER; note = uracil
  modified_base 52: mod_base = OTHER; note = uracil
  source 1..54: mol_type = other DNA
tgacaaggcgtagtcacggtnnnactnnntgatgtgatccttgccaggtaatcc

SEQ ID NO: 1341 - DNA, 53 bp, synthetic construct
  misc_feature 1..53: note = Synthetic Primer
  misc_difference 21..23: note = n is a, c, g, t or u
  misc_difference 27..29: note = n is a, c, g, t or u
  modified_base 20: mod_base = OTHER; note = uracil
  modified_base 33: mod_base = OTHER; note = uracil
  modified_base 43..44: mod_base = OTHER; note = uracil
  modified_base 50..52: mod_base = OTHER; note = uracil
  source 1..53: mol_type = other DNA
tgacaaggcgtagtcacggtnnnactnnntgatccgagggaattcccactttg

SEQ ID NO: 1342 - DNA, 52 bp, synthetic construct
  misc_feature 1..52: note = Synthetic Primer
  misc_difference 21..23: note = n is a, c, g, t or u
  misc_difference 27..29: note = n is a, c, g, t or u
  modified_base 20: mod_base = OTHER; note = uracil
  modified_base 33: mod_base = OTHER; note = uracil
  modified_base 43: mod_base = OTHER; note = uracil
  modified_base 47: mod_base = OTHER; note = uracil
  modified_base 50: mod_base = OTHER; note = uracil
  source 1..52: mol_type = other DNA
tgacaaggcgtagtcacggtnnnactnnntgatagcaaccactcgatcctgt

SEQ ID NO: 1343 - DNA, 51 bp, synthetic construct
  misc_feature 1..51: note = Synthetic Primer
  misc_difference 21..23: note = n is a, c, g, t or u
  misc_difference 27..29: note = n is a, c, g, t or u
  modified_base 20: mod_base = OTHER; note = uracil
  modified_base 33: mod_base = OTHER; note = uracil
  modified_base 48: mod_base = OTHER; note = uracil
  modified_base 50: mod_base = OTHER; note = uracil
  source 1..51: mol_type = other DNA
tgacaaggcgtagtcacggtnnnactnnntgatcgggaagcgggagatctt

SEQ ID NO: 1344 - DNA, 54 bp, synthetic construct
  misc_feature 1..54: note = Synthetic Primer
  misc_difference 21..23: note = n is a, c, g, t or u
  misc_difference 27..29: note = n is a, c, g, t or u
  modified_base 20: mod_base = OTHER; note = uracil
  modified_base 33: mod_base = OTHER; note = uracil
  modified_base 37..38: mod_base = OTHER; note = uracil
  modified_base 45: mod_base = OTHER; note = uracil
  modified_base 48: mod_base = OTHER; note = uracil
  source 1..54: mol_type = other DNA
tgacaaggcgtagtcacggtnnnactnnntgatacattgggagctgatgaggat

SEQ ID NO: 1345 - DNA, 54 bp, synthetic construct
  misc_feature 1..54: note = Synthetic Primer
  misc_difference 21..23: note = n is a, c, g, t or u
  misc_difference 27..29: note = n is a, c, g, t or u
  modified_base 20: mod_base = OTHER; note = uracil
  modified_base 33: mod_base = OTHER; note = uracil
  modified_base 36: mod_base = OTHER; note = uracil
  modified_base 38: mod_base = OTHER; note = uracil
  modified_base 40..41: mod_base = OTHER; note = uracil
  modified_base 44: mod_base = OTHER; note = uracil
  modified_base 47: mod_base = OTHER; note = uracil
  modified_base 51: mod_base = OTHER; note = uracil
  source 1..54: mol_type = other DNA
tgacaaggcgtagtcacggtnnnactnnntgatggtgtcttcatcctcgatggt

SEQ ID NO: 1346 - DNA, 56 bp, synthetic construct
  misc_feature 1..56: note = Synthetic Primer
  misc_difference 21..23: note = n is a, c, g, t or u
  misc_difference 27..29: note = n is a, c, g, t or u
  modified_base 20: mod_base = OTHER; note = uracil
  modified_base 33: mod_base = OTHER; note = uracil
  modified_base 35..36: mod_base = OTHER; note = uracil
  modified_base 39: mod_base = OTHER; note = uracil
  modified_base 44: mod_base = OTHER; note = uracil
  modified_base 47..48: mod_base = OTHER; note = uracil
  modified_base 50: mod_base = OTHER; note = uracil
  source 1..56: mol_type = other DNA
tgacaaggcgtagtcacggtnnnactnnntgatgttcctcagatcattctccagct

SEQ ID NO: 1347 - DNA, 52 bp, synthetic construct
  misc_feature 1..52: note = Synthetic Primer
  misc_difference 21..23: note = n is a, c, g, t or u
  misc_difference 27..29: note = n is a, c, g, t or u
  modified_base 20: mod_base = OTHER; note = uracil
  modified_base 33..34: mod_base = OTHER; note = uracil
  modified_base 37..38: mod_base = OTHER; note = uracil
  modified_base 43: mod_base = OTHER; note = uracil
  modified_base 48: mod_base = OTHER; note = uracil
  source 1..52: mol_type = other DNA
tgacaaggcgtagtcacggtnnnactnnntgattgcttggagtcagctgagg

SEQ ID NO: 1348 - DNA, 52 bp, synthetic construct
  misc_feature 1..52: note = Synthetic Primer
  misc_difference 21..23: note = n is a, c, g, t or u
  misc_difference 27..29: note = n is a, c, g, t or u
  modified_base 20: mod_base = OTHER; note = uracil
  modified_base 33: mod_base = OTHER; note = uracil
  modified_base 35: mod_base = OTHER; note = uracil
  modified_base 41..43: mod_base = OTHER; note = uracil
  modified_base 46: mod_base = OTHER; note = uracil
  modified_base 51: mod_base = OTHER; note = uracil
  source 1..52: mol_type = other DNA
tgacaaggcgtagtcacggtnnnactnnntgatatcgccctttggtggaatc

SEQ ID NO: 1349 - DNA, 54 bp, synthetic construct
  misc_feature 1..54: note = Synthetic Primer
  misc_difference 21..23: note = n is a, c, g, t or u
  misc_difference 27..29: note = n is a, c, g, t or u
  modified_base 20: mod_base = OTHER; note = uracil
  modified_base 33: mod_base = OTHER; note = uracil
  modified_base 37: mod_base = OTHER; note = uracil
  modified_base 41: mod_base = OTHER; note = uracil
  modified_base 43: mod_base = OTHER; note = uracil
  modified_base 52: mod_base = OTHER; note = uracil
  source 1..54: mol_type = other DNA
tgacaaggcgtagtcacggtnnnactnnntgatgggtcaatctggaagacatgc

SEQ ID NO: 1350 - DNA, 55 bp, synthetic construct
  misc_feature 1..55: note = Synthetic Primer
  misc_difference 21..23: note = n is a, c, g, t or u
  misc_difference 27..29: note = n is a, c, g, t or u
  modified_base 20: mod_base = OTHER; note = uracil
  modified_base 33: mod_base = OTHER; note = uracil
  modified_base 41: mod_base = OTHER; note = uracil
  modified_base 43..46: mod_base = OTHER; note = uracil
  modified_base 52: mod_base = OTHER; note = uracil
  source 1..55: mol_type = other DNA
tgacaaggcgtagtcacggtnnnactnnntgatacaaggctgttttggagatgga

SEQ ID NO: 1351 - DNA, 51 bp, synthetic construct
  misc_feature 1..51: note = Synthetic Primer
  misc_difference 21..23: note = n is a, c, g, t or u
  misc_difference 27..29: note = n is a, c, g, t or u
  modified_base 20: mod_base = OTHER; note = uracil
  modified_base 33: mod_base = OTHER; note = uracil
  modified_base 37: mod_base = OTHER; note = uracil
  modified_base 39: mod_base = OTHER; note = uracil
  modified_base 41: mod_base = OTHER; note = uracil
  modified_base 46: mod_base = OTHER; note = uracil
  modified_base 49: mod_base = OTHER; note = uracil
  source 1..51: mol_type = other DNA
tgacaaggcgtagtcacggtnnnactnnntgatacatgtctccgctggtcg

SEQ ID NO: 1352 - DNA, 58 bp, synthetic construct
  misc_feature 1..58: note = Synthetic Primer
  misc_difference 21..23: note = n is a, c, g, t or u
  misc_difference 27..29: note = n is a, c, g, t or u
  modified_base 20: mod_base = OTHER; note = uracil
  modified_base 33..34: mod_base = OTHER; note = uracil
  modified_base 37: mod_base = OTHER; note = uracil
  modified_base 39: mod_base = OTHER; note = uracil
  modified_base 43: mod_base = OTHER; note = uracil
  modified_base 45: mod_base = OTHER; note = uracil
  modified_base 49..51: mod_base = OTHER; note = uracil
  modified_base 56..57: mod_base = OTHER; note = uracil
  source 1..58: mol_type = other DNA
tgacaaggcgtagtcacggtnnnactnnntgattcatatggctatccctttgcaattc

SEQ ID NO: 1353 - DNA, 57 bp, synthetic construct
  misc_feature 1..57: note = Synthetic Primer
  misc_difference 21..23: note = n is a, c, g, t or u
  misc_difference 27..29: note = n is a, c, g, t or u
  modified_base 20: mod_base = OTHER; note = uracil
  modified_base 33..34: mod_base = OTHER; note = uracil
  modified_base 38: mod_base = OTHER; note = uracil
  modified_base 40: mod_base = OTHER; note = uracil
  modified_base 44: mod_base = OTHER; note = uracil
  modified_base 47: mod_base = OTHER; note = uracil
  modified_base 50: mod_base = OTHER; note = uracil
  modified_base 53: mod_base = OTHER; note = uracil
  source 1..57: mol_type = other DNA
tgacaaggcgtagtcacggtnnnactnnntgattcagtctccatgatagtggtccag

SEQ ID NO: 1354 - DNA, 58 bp, synthetic construct
  misc_feature 1..58: note = Synthetic Primer
  misc_difference 21..23: note = n is a, c, g, t or u
  misc_difference 27..29: note = n is a, c, g, t or u
  modified_base 20: mod_base = OTHER; note = uracil
  modified_base 33: mod_base = OTHER; note = uracil
  modified_base 39: mod_base = OTHER; note = uracil
  modified_base 44: mod_base = OTHER; note = uracil
  modified_base 46..48: mod_base = OTHER; note = uracil
  modified_base 52: mod_base = OTHER; note = uracil
  modified_base 54: mod_base = OTHER; note = uracil
  source 1..58: mol_type = other DNA
tgacaaggcgtagtcacggtnnnactnnntgatggaagtcaaatatttgcctctccag

SEQ ID NO: 1355 - DNA, 50 bp, synthetic construct
  misc_feature 1..50: note = Synthetic Primer
  misc_difference 21..23: note = n is a, c, g, t or u
  misc_difference 27..29: note = n is a, c, g, t or u
  modified_base 20: mod_base = OTHER; note = uracil
  modified_base 33..34: mod_base = OTHER; note = uracil
  modified_base 37: mod_base = OTHER; note = uracil
  modified_base 40: mod_base = OTHER; note = uracil
  modified_base 46: mod_base = OTHER; note = uracil
  source 1..50: mol_type = other DNA
tgacaaggcgtagtcacggtnnnactnnntgattgatggtcgaggtgcgg

SEQ ID NO: 1356 - DNA, 55 bp, synthetic construct
  misc_feature 1..55: note = Synthetic Primer
  misc_difference 21..23: note = n is a, c, g, t or u
  misc_difference 27..29: note = n is a, c, g, t or u
  modified_base 20: mod_base = OTHER; note = uracil
  modified_base 33: mod_base = OTHER; note = uracil
  modified_base 41: mod_base = OTHER; note = uracil
  modified_base 49: mod_base = OTHER; note = uracil
  modified_base 52..54: mod_base = OTHER; note = uracil
  source 1..55: mol_type = other DNA
tgacaaggcgtagtcacggtnnnactnnntgatcaaacactgccgaggtgatttt

SEQ ID NO: 1357 - DNA, 56 bp, synthetic construct
  misc_feature 1..56: note = Synthetic Primer
  misc_difference 21..23: note = n is a, c, g, t or u
  misc_difference 27..29: note = n is a, c, g, t or u
  modified_base 20: mod_base = OTHER; note = uracil
  modified_base 33: mod_base = OTHER; note = uracil
  modified_base 43: mod_base = OTHER; note = uracil
  modified_base 49: mod_base = OTHER; note = uracil
  source 1..56: mol_type = other DNA
tgacaaggcgtagtcacggtnnnactnnntgatcccaagaaatcgaactccacaag

SEQ ID NO: 1358 - DNA, 61 bp, synthetic construct
  misc_feature 1..61: note = Synthetic Primer
  misc_difference 21..23: note = n is a, c, g, t or u
  misc_difference 27..29: note = n is a, c, g, t or u
  modified_base 20: mod_base = OTHER; note = uracil
  modified_base 33: mod_base = OTHER; note = uracil
  modified_base 36: mod_base = OTHER; note = uracil
  modified_base 41: mod_base = OTHER; note = uracil
  modified_base 44: mod_base = OTHER; note = uracil
  modified_base 48..49: mod_base = OTHER; note = uracil
  modified_base 53: mod_base = OTHER; note = uracil
  modified_base 56..58: mod_base = OTHER; note = uracil
  source 1..61: mol_type = other DNA
tgacaaggcgtagtcacggtnnnactnnntgatcatcaactcatgaattagctggtttcga

SEQ ID NO: 1359 - DNA, 53 bp, synthetic construct
  misc_feature 1..53: note = Synthetic Primer
  misc_difference 21..23: note = n is a, c, g, t or u
  misc_difference 27..29: note = n is a, c, g, t or u
  modified_base 20: mod_base = OTHER; note = uracil
  modified_base 33: mod_base = OTHER; note = uracil
  modified_base 36: mod_base = OTHER; note = uracil
  modified_base 41..42: mod_base = OTHER; note = uracil
  source 1..53: mol_type = other DNA
tgacaaggcgtagtcacggtnnnactnnntgatggtgcacttcacaacagggt

SEQ ID NO: 1360 - DNA, 54 bp, synthetic construct
  misc_feature 1..54: note = Synthetic Primer
  misc_difference 21..23: note = n is a, c, g, t or u
  misc_difference 27..29: note = n is a, c, g, t or u
  modified_base 20: mod_base = OTHER; note = uracil
  modified_base 33: mod_base = OTHER; note = uracil
  modified_base 38: mod_base = OTHER; note = uracil
  modified_base 41: mod_base = OTHER; note = uracil
  modified_base 47: mod_base = OTHER; note = uracil
  source 1..54: mol_type = other DNA
tgacaaggcgtagtcacggtnnnactnnntgatggaatactccagctcacaggg

SEQ ID NO: 1361 - DNA, 56 bp, synthetic construct
  misc_feature 1..56: note = Synthetic Primer
  misc_difference 21..23: note = n is a, c, g, t or u
  misc_difference 27..29: note = n is a, c, g, t or u
  modified_base 20: mod_base = OTHER; note = uracil
  modified_base 33..35: mod_base = OTHER; note = uracil
  modified_base 37: mod_base = OTHER; note = uracil
  modified_base 40..41: mod_base = OTHER; note = uracil
  modified_base 51: mod_base = OTHER; note = uracil
  modified_base 53: mod_base = OTHER; note = uracil
  modified_base 55: mod_base = OTHER; note = uracil
  source 1..56: mol_type = other DNA
tgacaaggcgtagtcacggtnnnactnnntgatttatccttaaggagccctgtgtg

SEQ ID NO: 1362 - DNA, 53 bp, synthetic construct
  misc_feature 1..53: note = Synthetic Primer
  misc_difference 21..23: note = n is a, c, g, t or u
  misc_difference 27..29: note = n is a, c, g, t or u
  modified_base 20: mod_base = OTHER; note = uracil
  modified_base 33: mod_base = OTHER; note = uracil
  modified_base 38: mod_base = OTHER; note = uracil
  modified_base 42: mod_base = OTHER; note = uracil
  modified_base 44: mod_base = OTHER; note = uracil
  modified_base 46..47: mod_base = OTHER; note = uracil
  modified_base 52: mod_base = OTHER; note = uracil
  source 1..53: mol_type = other DNA
tgacaaggcgtagtcacggtnnnactnnntgatcccgtgcctgtattcaagtg

SEQ ID NO: 1363 - DNA, 66 bp, synthetic construct
  misc_feature 1..66: note = Synthetic Primer
  misc_difference 21..23: note = n is a, c, g, t or u
  misc_difference 27..29: note = n is a, c, g, t or u
  modified_base 20: mod_base = OTHER; note = uracil
  modified_base 33: mod_base = OTHER; note = uracil
  modified_base 35: mod_base = OTHER; note = uracil
  modified_base 38: mod_base = OTHER; note = uracil
  modified_base 40..41: mod_base = OTHER; note = uracil
  modified_base 43: mod_base = OTHER; note = uracil
  modified_base 45: mod_base = OTHER; note = uracil
  modified_base 47..49: mod_base = OTHER; note = uracil
  modified_base 52..53: mod_base = OTHER; note = uracil
  modified_base 55: mod_base = OTHER; note = uracil
  modified_base 60: mod_base = OTHER; note = uracil
  modified_base 62: mod_base = OTHER; note = uracil
  source 1..66: mol_type = other DNA
tgacaaggcgtagtcacggtnnnactnnntgatgtggtattctgtctttaattgtaagatatgcaa

SEQ ID NO: 1364 - DNA, 61 bp, synthetic construct
  misc_feature 1..61: note = Synthetic Primer
  misc_difference 21..23: note = n is a, c, g, t or u
  misc_difference 27..29: note = n is a, c, g, t or u
  modified_base 20: mod_base = OTHER; note = uracil
  modified_base 33: mod_base = OTHER; note = uracil
  modified_base 35: mod_base = OTHER; note = uracil
  modified_base 37..38: mod_base = OTHER; note = uracil
  modified_base 44..45: mod_base = OTHER; note = uracil
  modified_base 49..50: mod_base = OTHER; note = uracil
  modified_base 52: mod_base = OTHER; note = uracil
  modified_base 55..56: mod_base = OTHER; note = uracil
  modified_base 58: mod_base = OTHER; note = uracil
  modified_base 60: mod_base = OTHER; note = uracil
  source 1..61: mol_type = other DNA
tgacaaggcgtagtcacggtnnnactnnntgatatcttccaccttaaattctggttctgta

SEQ ID NO: 1365 - DNA, 53 bp, synthetic construct
  misc_feature 1..53: note = Synthetic Primer
  misc_difference 21..23: note = n is a, c, g, t or u
  misc_difference 27..29: note = n is a, c, g, t or u
  modified_base 20: mod_base = OTHER; note = uracil
  modified_base 33: mod_base = OTHER; note = uracil
  modified_base 37: mod_base = OTHER; note = uracil
  modified_base 39..40: mod_base = OTHER; note = uracil
  modified_base 45..46: mod_base = OTHER; note = uracil
  modified_base 49: mod_base = OTHER; note = uracil
  source 1..53: mol_type = other DNA
tgacaaggcgtagtcacggtnnnactnnntgatgggtgttggagttcatggag

SEQ ID NO: 1366 - DNA, 58 bp, synthetic construct
  misc_feature 1..58: note = Synthetic Primer
  misc_difference 21..23: note = n is a, c, g, t or u
  misc_difference 27..29: note = n is a, c, g, t or u
  modified_base 20: mod_base = OTHER; note = uracil
  modified_base 33..34: mod_base = OTHER; note = uracil
  modified_base 36: mod_base = OTHER; note = uracil
  modified_base 40: mod_base = OTHER; note = uracil
  modified_base 42: mod_base = OTHER; note = uracil
  modified_base 52: mod_base = OTHER; note = uracil
  modified_base 54..55: mod_base = OTHER; note = uracil
  source 1..58: mol_type = other DNA
tgacaaggcgtagtcacggtnnnactnnntgattctagctgtagcacaaaatcttcgt

SEQ ID NO: 1367 - DNA, 50 bp, synthetic construct
  misc_feature 1..50: note = Synthetic Primer
  misc_difference 21..23: note = n is a, c, g, t or u
  misc_difference 27..29: note = n is a, c, g, t or u
  modified_base 20: mod_base = OTHER; note = uracil
  modified_base 33..38: mod_base = OTHER; note = uracil
  modified_base 49: mod_base = OTHER; note = uracil
  source 1..50: mol_type = other DNA
tgacaaggcgtagtcacggtnnnactnnntgattttttccgcggcacctc

SEQ ID NO: 1368 - DNA, 56 bp, synthetic construct
  misc_feature 1..56: note = Synthetic Primer
  misc_difference 21..23: note = n is a, c, g, t or u
  misc_difference 27..29: note = n is a, c, g, t or u
  modified_base 20: mod_base = OTHER; note = uracil
  modified_base 33..34: mod_base = OTHER; note = uracil
  modified_base 37..38: mod_base = OTHER; note = uracil
  modified_base 45: mod_base = OTHER; note = uracil
  modified_base 47: mod_base = OTHER; note = uracil
  modified_base 55: mod_base = OTHER; note = uracil
  source 1..56: mol_type = other DNA
tgacaaggcgtagtcacggtnnnactnnntgattggttgaggactgtgagacagtt

SEQ ID NO: 1369 - DNA, 54 bp, synthetic construct
  misc_feature 1..54: note = Synthetic Primer
  misc_difference 21..23: note = n is a, c, g, t or u
  misc_difference 27..29: note = n is a, c, g, t or u
  modified_base 20: mod_base = OTHER; note = uracil
  modified_base 33: mod_base = OTHER; note = uracil
  modified_base 35: mod_base = OTHER; note = uracil
  modified_base 39: mod_base = OTHER; note = uracil
  modified_base 44..45: mod_base = OTHER; note = uracil
  modified_base 50: mod_base = OTHER; note = uracil
  source 1..54: mol_type = other DNA
tgacaaggcgtagtcacggtnnnactnnntgatctcgctgagattgaactggag

SEQ ID NO: 1370 - DNA, 52 bp, synthetic construct
  misc_feature 1..52: note = Synthetic Primer
  misc_difference 21..23: note = n is a, c, g, t or u
  misc_difference 27..29: note = n is a, c, g, t or u
  modified_base 20: mod_base = OTHER; note = uracil
  modified_base 33: mod_base = OTHER; note = uracil
  modified_base 35: mod_base = OTHER; note = uracil
  modified_base 45: mod_base = OTHER; note = uracil
  modified_base 47..48: mod_base = OTHER; note = uracil
  source 1..52: mol_type = other DNA
tgacaaggcgtagtcacggtnnnactnnntgatctgcagggccatcttggag

SEQ ID NO: 1371 - DNA, 50 bp, synthetic construct
  misc_feature 1..50: note = Synthetic Primer
  misc_difference 21..23: note = n is a, c, g, t or u
  misc_difference 27..29: note = n is a, c, g, t or u
  modified_base 20: mod_base = OTHER; note = uracil
  modified_base 33: mod_base = OTHER; note = uracil
  modified_base 35: mod_base = OTHER; note = uracil
  modified_base 48: mod_base = OTHER; note = uracil
  source 1..50: mol_type = other DNA
tgacaaggcgtagtcacggtnnnactnnntgatgtcagccccagggatgg

SEQ ID NO: 1372 - DNA, 54 bp, synthetic construct
  misc_feature 1..54: note = Synthetic Primer
  misc_difference 21..23: note = n is a, c, g, t or u
  misc_difference 27..29: note = n is a, c, g, t or u
  modified_base 20: mod_base = OTHER; note = uracil
  modified_base 33: mod_base = OTHER; note = uracil
  modified_base 39: mod_base = OTHER; note = uracil
  modified_base 42: mod_base = OTHER; note = uracil
  modified_base 49: mod_base = OTHER; note = uracil
  modified_base 51: mod_base = OTHER; note = uracil
  source 1..54: mol_type = other DNA
tgacaaggcgtagtcacggtnnnactnnntgatcacagtgataggaggtgtggg

SEQ ID NO: 1373 - DNA, 55 bp, synthetic construct
  misc_feature 1..55: note = Synthetic Primer
  misc_difference 21..23: note = n is a, c, g, t or u
  misc_difference 27..29: note = n is a, c, g, t or u
  modified_base 20: mod_base = OTHER; note = uracil
  modified_base 33: mod_base = OTHER; note = uracil
  modified_base 49: mod_base = OTHER; note = uracil
  modified_base 51..52: mod_base = OTHER; note = uracil
  modified_base 54: mod_base = OTHER; note = uracil
  source 1..55: mol_type = other DNA
tgacaaggcgtagtcacggtnnnactnnntgatcccagagcaaggaagtgttatc

SEQ ID NO: 1374 - DNA, 52 bp, synthetic construct
  misc_feature 1..52: note = Synthetic Primer
  misc_difference 21..23: note = n is a, c, g, t or u
  misc_difference 27..29: note = n is a, c, g, t or u
  modified_base 20: mod_base = OTHER; note = uracil
  modified_base 33: mod_base = OTHER; note = uracil
  modified_base 44: mod_base = OTHER; note = uracil
  modified_base 46: mod_base = OTHER; note = uracil
  modified_base 49: mod_base = OTHER; note = uracil
  source 1..52: mol_type = other DNA
tgacaaggcgtagtcacggtnnnactnnntgatgccacgagagtgtggtgag

SEQ ID NO: 1375 - DNA, 52 bp, synthetic construct
  misc_feature 1..52: note = Synthetic Primer
  misc_difference 21..23: note = n is a, c, g, t or u
  misc_difference 27..29: note = n is a, c, g, t or u
  modified_base 20: mod_base = OTHER; note = uracil
  modified_base 33: mod_base = OTHER; note = uracil
  modified_base 37: mod_base = OTHER; note = uracil
  modified_base 45: mod_base = OTHER; note = uracil
  modified_base 47: mod_base = OTHER; note = uracil
  modified_base 49..50: mod_base = OTHER; note = uracil
  source 1..52: mol_type = other DNA
tgacaaggcgtagtcacggtnnnactnnntgatcactccagccgtctcttgc

SEQ ID NO: 1376 - DNA, 52 bp, synthetic construct
  misc_feature 1..52: note = Synthetic Primer
  misc_difference 21..23: note = n is a, c, g, t or u
  misc_difference 27..29: note = n is a, c, g, t or u
  modified_base 20: mod_base = OTHER; note = uracil
  modified_base 33: mod_base = OTHER; note = uracil
  modified_base 36: mod_base = OTHER; note = uracil
  modified_base 44: mod_base = OTHER; note = uracil
  modified_base 47: mod_base = OTHER; note = uracil
  modified_base 50: mod_base = OTHER; note = uracil
  source 1..52: mol_type = other DNA
tgacaaggcgtagtcacggtnnnactnnntgataatgcaccagtggtggtct

SEQ ID NO: 1377 - DNA, 64 bp, synthetic construct
  misc_feature 1..64: note = Synthetic Primer
  misc_difference 21..23: note = n is a, c, g, t or u
  misc_difference 27..29: note = n is a, c, g, t or u
  modified_base 20: mod_base = OTHER; note = uracil
  modified_base 33: mod_base = OTHER; note = uracil
  modified_base 37..38: mod_base = OTHER; note = uracil
  modified_base 40..41: mod_base = OTHER; note = uracil
  modified_base 45..46: mod_base = OTHER; note = uracil
  modified_base 49: mod_base = OTHER; note = uracil
  modified_base 52: mod_base = OTHER; note = uracil
  modified_base 54: mod_base = OTHER; note = uracil
  modified_base 56: mod_base = OTHER; note = uracil
  modified_base 59..60: mod_base = OTHER; note = uracil
  modified_base 63: mod_base = OTHER; note = uracil
  source 1..64: mol_type = other DNA
tgacaaggcgtagtcacggtnnnactnnntgatcccttcttaaattgctcctgtatcattgatt

SEQ ID NO: 1378 - DNA, 66 bp, synthetic construct
  misc_feature 1..66: note = Synthetic Primer
  misc_difference 21..23: note = n is a, c, g, t or u
  misc_difference 27..29: note = n is a, c, g, t or u
  modified_base 20: mod_base = OTHER; note = uracil
  modified_base 33..34: mod_base = OTHER; note = uracil
  modified_base 36..37: mod_base = OTHER; note = uracil
  modified_base 40: mod_base = OTHER; note = uracil
  modified_base 42: mod_base = OTHER; note = uracil
  modified_base 44: mod_base = OTHER; note = uracil
  modified_base 49..50: mod_base = OTHER; note = uracil
  modified_base 53: mod_base = OTHER; note = uracil
  modified_base 56..58: mod_base = OTHER; note = uracil
  modified_base 60..62: mod_base = OTHER; note = uracil
  modified_base 65: mod_base = OTHER; note = uracil
  source 1..66: mol_type = other DNA
tgacaaggcgtagtcacggtnnnactnnntgattgttcctgtgtcaacttaatcatttgtttgata

SEQ ID NO: 1379 - DNA, 52 bp, synthetic construct
  misc_feature 1..52: note = Synthetic Primer
  misc_difference 21..23: note = n is a, c, g, t or u
  misc_difference 27..29: note = n is a, c, g, t or u
  modified_base 20: mod_base = OTHER; note = uracil
  modified_base 33: mod_base = OTHER; note = uracil
  modified_base 47: mod_base = OTHER; note = uracil
  modified_base 51: mod_base = OTHER; note = uracil
  source 1..52: mol_type = other DNA
tgacaaggcgtagtcacggtnnnactnnntgatgcaggagccaaggtcagtg

SEQ ID NO: 1380 - DNA, 51 bp, synthetic construct
  misc_feature 1..51: note = Synthetic Primer
  misc_difference 21..23: note = n is a, c, g, t or u
  misc_difference 27..29: note = n is a, c, g, t or u
  modified_base 20: mod_base = OTHER; note = uracil
  modified_base 33: mod_base = OTHER; note = uracil
  modified_base 41: mod_base = OTHER; note = uracil
  modified_base 50: mod_base = OTHER; note = uracil
  source 1..51: mol_type = other DNA
tgacaaggcgtagtcacggtnnnactnnntgatcagcgaatgggcagcatg

SEQ ID NO: 1381 - DNA, 51 bp, synthetic construct
  misc_feature 1..51: note = Synthetic Primer
  misc_difference 21..23: note = n is a, c, g, t or u
  misc_difference 27..29: note = n is a, c, g, t or u
  modified_base 20: mod_base = OTHER; note = uracil
  modified_base 33..34: mod_base = OTHER; note = uracil
  modified_base 43..44: mod_base = OTHER; note = uracil
  modified_base 47..48: mod_base = OTHER; note = uracil
  source 1..51: mol_type = other DNA
tgacaaggcgtagtcacggtnnnactnnntgattccgcaggcttccttagg

SEQ ID NO: 1382 - DNA, 54 bp, synthetic construct
  misc_feature 1..54: note = Synthetic Primer
  misc_difference 21..23: note = n is a, c, g, t or u
  misc_difference 27..29: note = n is a, c, g, t or u
  modified_base 20: mod_base = OTHER; note = uracil
  modified_base 33: mod_base = OTHER; note = uracil
  modified_base 35..36: mod_base = OTHER; note = uracil
  modified_base 41: mod_base = OTHER; note = uracil
  modified_base 43: mod_base = OTHER; note = uracil
  source 1..54: mol_type = other DNA
tgacaaggcgtagtcacggtnnnactnnntgatattccgatgtcagcaccaaag

SEQ ID NO: 1383 - DNA, 54 bp, synthetic construct
  misc_feature 1..54: note = Synthetic Primer
  misc_difference 21..23: note = n is a, c, g, t or u
  misc_difference 27..29: note = n is a, c, g, t or u
  modified_base 20: mod_base = OTHER; note = uracil
  modified_base 33: mod_base = OTHER; note = uracil
  modified_base 36: mod_base = OTHER; note = uracil
  modified_base 38..39: mod_base = OTHER; note = uracil
  modified_base 46..47: mod_base = OTHER; note = uracil
  modified_base 49: mod_base = OTHER; note = uracil
  modified_base 53: mod_base = OTHER; note = uracil
  source 1..54: mol_type = other DNA
tgacaaggcgtagtcacggtnnnactnnntgatagtcttccccacttctgcctt

SEQ ID NO: 1384 - DNA, 57 bp, synthetic construct
  misc_feature 1..57: note = Synthetic Primer
  misc_difference 21..23: note = n is a, c, g, t or u
  misc_difference 27..29: note = n is a, c, g, t or u
  modified_base 20: mod_base = OTHER; note = uracil
  modified_base 33: mod_base = OTHER; note = uracil
  modified_base 41: mod_base = OTHER; note = uracil
  modified_base 44: mod_base = OTHER; note = uracil
  modified_base 48: mod_base = OTHER; note = uracil
  modified_base 53: mod_base = OTHER; note = uracil
  source 1..57: mol_type = other DNA
tgacaaggcgtagtcacggtnnnactnnntgatgccagagtcatagctggagtaact

SEQ ID NO: 1385 - DNA, 57 bp, synthetic construct
  misc_feature 1..57: note = Synthetic Primer
  misc_difference 21..23: note = n is a, c, g, t or u
  misc_difference 27..29: note = n is a, c, g, t or u
  modified_base 20: mod_base = OTHER; note = uracil
  modified_base 33: mod_base = OTHER; note = uracil
  modified_base 38: mod_base = OTHER; note = uracil
  modified_base 43..45: mod_base = OTHER; note = uracil
  modified_base 50: mod_base = OTHER; note = uracil
  modified_base 54..56: mod_base = OTHER; note = uracil
  source 1..57: mol_type = other DNA
tgacaaggcgtagtcacggtnnnactnnntgatagcatcaaatttgcgctggatttc

SEQ ID NO: 1386 - DNA, 54 bp, synthetic construct
  misc_feature 1..54: note = Synthetic Primer
  misc_difference 21..23: note = n is a, c, g, t or u
  misc_difference 27..29: note = n is a, c, g, t or u
  modified_base 20: mod_base = OTHER; note = uracil
  modified_base 33..34: mod_base = OTHER; note = uracil
  modified_base 37..38: mod_base = OTHER; note = uracil
  modified_base 40: mod_base = OTHER; note = uracil
  modified_base 53: mod_base = OTHER; note = uracil
  source 1..54: mol_type = other DNA
tgacaaggcgtagtcacggtnnnactnnntgattccttctccaaggccagaatc

SEQ ID NO: 1387 - DNA, 50 bp, synthetic construct
  misc_feature 1..50: note = Synthetic Primer
  misc_difference 21..23: note = n is a, c, g, t or u
  misc_difference 27..29: note = n is a, c, g, t or u
  modified_base 20: mod_base = OTHER; note = uracil
  modified_base 33: mod_base = OTHER; note = uracil
  modified_base 38: mod_base = OTHER; note = uracil
  modified_base 41: mod_base = OTHER; note = uracil
  modified_base 48: mod_base = OTHER; note = uracil
  source 1..50: mol_type = other DNA
tgacaaggcgtagtcacggtnnnactnnntgataggctcctccaggctca

SEQ ID NO: 1388 - DNA, 59 bp, synthetic construct
  misc_feature 1..59: note = Synthetic Primer
  misc_difference 21..23: note = n is a, c, g, t or u
  misc_difference 27..29: note = n is a, c, g, t or u
  modified_base 20: mod_base = OTHER; note = uracil
  modified_base 33: mod_base = OTHER; note = uracil
  modified_base 39..40: mod_base = OTHER; note = uracil
  modified_base 42: mod_base = OTHER; note = uracil
  modified_base 44..45: mod_base = OTHER; note = uracil
  modified_base 48..51: mod_base = OTHER; note = uracil
  modified_base 54..56: mod_base = OTHER; note = uracil
  source 1..59: mol_type = other DNA
tgacaaggcgtagtcacggtnnnactnnntgatacaccttgtcttgattttactttccc

SEQ ID NO: 1389 - DNA, 65 bp, synthetic construct
  misc_feature 1..65: note = Synthetic Primer
  misc_difference 21..23: note = n is a, c, g, t or u
  misc_difference 27..29: note = n is a, c, g, t or u
  modified_base 20: mod_base = OTHER; note = uracil
  modified_base 33..34: mod_base = OTHER; note = uracil
  modified_base 36: mod_base = OTHER; note = uracil
  modified_base 38: mod_base = OTHER; note = uracil
  modified_base 41: mod_base = OTHER; note = uracil
  modified_base 43..44: mod_base = OTHER; note = uracil
  modified_base 46..48: mod_base = OTHER; note = uracil
  modified_base 50: mod_base = OTHER; note = uracil
  modified_base 53: mod_base = OTHER; note = uracil
  modified_base 55..57: mod_base = OTHER; note = uracil
  modified_base 59..60: mod_base = OTHER; note = uracil
  source 1..65: mol_type = other DNA
tgacaaggcgtagtcacggtnnnactnnntgattgtctgatattctttctcatatttcttcagct

SEQ ID NO: 1390 - DNA, 54 bp, synthetic construct
  misc_feature 1..54: note = Synthetic Primer
  misc_difference 21..23: note = n is a, c, g, t or u
  misc_difference 27..29: note = n is a, c, g, t or u
  modified_base 20: mod_base = OTHER; note = uracil
  modified_base 33: mod_base = OTHER; note = uracil
  modified_base 42: mod_base = OTHER; note = uracil
  modified_base 48: mod_base = OTHER; note = uracil
  modified_base 51: mod_base = OTHER; note = uracil
  modified_base 53: mod_base = OTHER; note = uracil
  source 1..54: mol_type = other DNA
tgacaaggcgtagtcacggtnnnactnnntgatgcagcaagtccaactgctatg

SEQ ID NO: 1391 - DNA, 60 bp, synthetic construct
  misc_feature 1..60: note = Synthetic Primer
  misc_difference 21..23: note = n is a, c, g, t or u
  misc_difference 27..29: note = n is a, c, g, t or u
  modified_base 20: mod_base = OTHER; note = uracil
  modified_base 33..34: mod_base = OTHER; note = uracil
  modified_base 41: mod_base = OTHER; note = uracil
  modified_base 43..44: mod_base = OTHER; note = uracil
  modified_base 48..49: mod_base = OTHER; note = uracil
  modified_base 53..55: mod_base = OTHER; note = uracil
  source 1..60: mol_type = other DNA
tgacaaggcgtagtcacggtnnnactnnntgattggaagatcttaacttccctttcaaga

SEQ ID NO: 1392 - DNA, 52 bp, synthetic construct
  misc_feature 1..52: note = Synthetic Primer
  misc_difference 21..23: note = n is a, c, g, t or u
  misc_difference 27..29: note = n is a, c, g, t or u
  modified_base 20: mod_base = OTHER; note = uracil
  modified_base 33: mod_base = OTHER; note = uracil
  modified_base 37: mod_base = OTHER; note = uracil
  modified_base 44..45: mod_base = OTHER; note = uracil
  source 1..52: mol_type = other DNA
tgacaaggcgtagtcacggtnnnactnnntgatagctgaggccttgcagaac

SEQ ID NO: 1393 - DNA, 53 bp, synthetic construct
  misc_feature 1..53: note = Synthetic Primer
  misc_difference 21..23: note = n is a, c, g, t or u
  misc_difference 27..29: note = n is a, c, g, t or u
  modified_base 20: mod_base = OTHER; note = uracil
  modified_base 33..36: mod_base = OTHER; note = uracil
  modified_base 42: mod_base = OTHER; note = uracil
  modified_base 44..45: mod_base = OTHER; note = uracil
  source 1..53: mol_type = other DNA
tgacaaggcgtagtcacggtnnnactnnntgattttcagcatcttcacggcca

SEQ ID NO: 1394 - DNA, 58 bp, synthetic construct
  misc_feature 1..58: note = Synthetic Primer
  misc_difference 21..23: note = n is a, c, g, t or u
  misc_difference 27..29: note = n is a, c, g, t or u
  modified_base 20: mod_base = OTHER; note = uracil
  modified_base 33: mod_base = OTHER; note = uracil
  modified_base 35: mod_base = OTHER; note = uracil
  modified_base 38: mod_base = OTHER; note = uracil
  modified_base 41: mod_base = OTHER; note = uracil
  modified_base 45: mod_base = OTHER; note = uracil
  modified_base 48..50: mod_base = OTHER; note = uracil
  modified_base 57: mod_base = OTHER; note = uracil
  source 1..58: mol_type = other DNA
tgacaaggcgtagtcacggtnnnactnnntgatctgatcctcagtggtttgaacagtc

SEQ ID NO: 1395 - DNA, 50 bp, synthetic construct
  misc_feature 1..50: note = Synthetic Primer
  misc_difference 21..23: note = n is a, c, g, t or u
  misc_difference 27..29: note = n is a, c, g, t or u
  modified_base 20: mod_base = OTHER; note = uracil
  modified_base 33: mod_base = OTHER; note = uracil
  modified_base 37: mod_base = OTHER; note = uracil
  modified_base 47..48: mod_base = OTHER; note = uracil
  source 1..50: mol_type = other DNA
tgacaaggcgtagtcacggtnnnactnnntgatgcgtgaccgggacttcc

SEQ ID NO: 1396 - DNA, 55 bp, synthetic construct
  misc_feature 1..55: note = Synthetic Primer
  misc_difference 21..23: note = n is a, c, g, t or u
  misc_difference 27..29: note = n is a, c, g, t or u
  modified_base 20: mod_base = OTHER; note = uracil
  modified_base 33: mod_base = OTHER; note = uracil
  modified_base 36: mod_base = OTHER; note = uracil
  modified_base 39..40: mod_base = OTHER; note = uracil
  modified_base 43: mod_base = OTHER; note = uracil
  modified_base 46: mod_base = OTHER; note = uracil
  source 1..55: mol_type = other DNA
tgacaaggcgtagtcacggtnnnactnnntgatcatcattgctgataacggaggc

SEQ ID NO: 1397 - DNA, 51 bp, synthetic construct
  misc_feature 1..51: note = Synthetic Primer
  misc_difference 21..23: note = n is a, c, g, t or u
  misc_difference 27..29: note = n is a, c, g, t or u
  modified_base 20: mod_base = OTHER; note = uracil
  modified_base 33..35: mod_base = OTHER; note = uracil
  modified_base 37..38: mod_base = OTHER; note = uracil
  modified_base 45..47: mod_base = OTHER; note = uracil
  source 1..51: mol_type = other DNA
tgacaaggcgtagtcacggtnnnactnnntgatttcttcccgcctttcccg

SEQ ID NO: 1398 - DNA, 65 bp, synthetic construct
  misc_feature 1..65: note = Synthetic Primer
  misc_difference 21..23: note = n is a, c, g, t or u
  misc_difference 27..29: note = n is a, c, g, t or u
  modified_base 20: mod_base = OTHER; note = uracil
  modified_base 33..34: mod_base = OTHER; note = uracil
  modified_base 36..38: mod_base = OTHER; note = uracil
  modified_base 46: mod_base = OTHER; note = uracil
  modified_base 48..49: mod_base = OTHER; note = uracil
  modified_base 53: mod_base = OTHER; note = uracil
  modified_base 56: mod_base = OTHER; note = uracil
  modified_base 58: mod_base = OTHER; note = uracil
  modified_base 60..61: mod_base = OTHER; note = uracil
  modified_base 63: mod_base = OTHER; note = uracil
  source 1..65: mol_type = other DNA
tgacaaggcgtagtcacggtnnnactnnntgattctttggcacaatattaactagtctattgtag

SEQ ID NO: 1399 - DNA, 52 bp, synthetic construct
  misc_feature 1..52: note = Synthetic Primer
  misc_difference 21..23: note = n is a, c, g, t or u
  misc_difference 27..29: note = n is a, c, g, t or u
  modified_base 20: mod_base = OTHER; note = uracil
  modified_base 33..35: mod_base = OTHER; note = uracil
  modified_base 40..41: mod_base = OTHER; note = uracil
  modified_base 43: mod_base = OTHER; note = uracil
  modified_base 46: mod_base = OTHER; note = uracil
  modified_base 49: mod_base = OTHER; note = uracil
  source 1..52: mol_type = other DNA
tgacaaggcgtagtcacggtnnnactnnntgatttgcgcttctcctcctcct

SEQ ID NO: 1400 - DNA, 60 bp, synthetic construct
  misc_feature 1..60: note = Synthetic Primer
  misc_difference 21..23: note = n is a, c, g, t or u
  misc_difference 27..29: note = n is a, c, g, t or u
  modified_base 20: mod_base = OTHER; note = uracil
  modified_base 33: mod_base = OTHER; note = uracil
  modified_base 36: mod_base = OTHER; note = uracil
  modified_base 43..44: mod_base = OTHER; note = uracil
  modified_base 46: mod_base = OTHER; note = uracil
  modified_base 51: mod_base = OTHER; note = uracil
  modified_base 55..56: mod_base = OTHER; note = uracil
  source 1..60: mol_type = other DNA
tgacaaggcgtagtcacggtnnnactnnntgatcatgaaccgttctgagatgaattagga

SEQ ID NO: 1401 - DNA, 59 bp, synthetic construct
  misc_feature 1..59: note = Synthetic Primer
  misc_difference 21..23: note = n is a, c, g, t or u
  misc_difference 27..29: note = n is a, c, g, t or u
  modified_base 20: mod_base = OTHER; note = uracil
  modified_base 33: mod_base = OTHER; note = uracil
  modified_base 36: mod_base = OTHER; note = uracil
  modified_base 39: mod_base = OTHER; note = uracil
  modified_base 46: mod_base = OTHER; note = uracil
  modified_base 48..49: mod_base = OTHER; note = uracil
  modified_base 54: mod_base = OTHER; note = uracil
  modified_base 56..57: mod_base = OTHER; note = uracil
  source 1..59: mol_type = other DNA
tgacaaggcgtagtcacggtnnnactnnntgatagtgatcagaggtcttgacatattgg

SEQ ID NO: 1402 - DNA, 50 bp, synthetic construct
  misc_feature 1..50: note = Synthetic Primer
  misc_difference 21..23: note = n is a, c, g, t or u
  misc_difference 27..29: note = n is a, c, g, t or u
  modified_base 20: mod_base = OTHER; note = uracil
  modified_base 33..34: mod_base = OTHER; note = uracil
  modified_base 41..42: mod_base = OTHER; note = uracil
  modified_base 45: mod_base = OTHER; note = uracil
  modified_base 47..48: mod_base = OTHER; note = uracil
  source 1..50: mol_type = other DNA
tgacaaggcgtagtcacggtnnnactnnntgattccggcattcgtgttgc

SEQ ID NO: 1403 - DNA, 59 bp, synthetic construct
  misc_feature 1..59: note = Synthetic Primer
  misc_difference 21..23: note = n is a, c, g, t or u
  misc_difference 27..29: note = n is a, c, g, t or u
  modified_base 20: mod_base = OTHER; note = uracil
  modified_base 33: mod_base = OTHER; note = uracil
  modified_base 41..42: mod_base = OTHER; note = uracil
  modified_base 44: mod_base = OTHER; note = uracil
  modified_base 46: mod_base = OTHER; note = uracil
  modified_base 53..54: mod_base = OTHER; note = uracil
  modified_base 56: mod_base = OTHER; note = uracil
  modified_base 58: mod_base = OTHER; note = uracil
  source 1..59: mol_type = other DNA
tgacaaggcgtagtcacggtnnnactnnntgatgacagacttctctcacacattgtgtc

SEQ ID NO: 1404 - DNA, 65 bp, synthetic construct
  misc_feature 1..65: note = Synthetic Primer
  misc_difference 21..23: note = n is a, c, g, t or u
  misc_difference 27..29: note = n is a, c, g, t or u
  modified_base 20: mod_base = OTHER; note = uracil
  modified_base 33: mod_base = OTHER; note = uracil
  modified_base 35: mod_base = OTHER; note = uracil
  modified_base 42..44: mod_base = OTHER; note = uracil
  modified_base 48..49: mod_base = OTHER; note = uracil
  modified_base 51..53: mod_base = OTHER; note = uracil
  modified_base 55..56: mod_base = OTHER; note = uracil
  modified_base 60..61: mod_base = OTHER; note = uracil
  modified_base 63..64: mod_base = OTHER; note = uracil
  source 1..65: mol_type = other DNA
tgacaaggcgtagtcacggtnnnactnnntgatctggaagctttaacttctttattaagttcttc

SEQ ID NO: 1405 - DNA, 59 bp, synthetic construct
  misc_feature 1..59: note = Synthetic Primer
  misc_difference 21..23: note = n is a, c, g, t or u
  misc_difference 27..29: note = n is a, c, g, t or u
  modified_base 20: mod_base = OTHER; note = uracil
  modified_base 33: mod_base = OTHER; note = uracil
  modified_base 37..39: mod_base = OTHER; note = uracil
  modified_base 48: mod_base = OTHER; note = uracil
  modified_base 50: mod_base = OTHER; note = uracil
  modified_base 54: mod_base = OTHER; note = uracil
  source 1..59: mol_type = other DNA
tgacaaggcgtagtcacggtnnnactnnntgatcactttgaccaaagtctcactgacaa

SEQ ID NO: 1406 - DNA, 51 bp, synthetic construct
  misc_feature 1..51: note = Synthetic Primer
  misc_difference 21..23: note = n is a, c, g, t or u
  misc_difference 27..29: note = n is a, c, g, t or u
  modified_base 20: mod_base = OTHER; note = uracil
  modified_base 33: mod_base = OTHER; note = uracil
  modified_base 37: mod_base = OTHER; note = uracil
  modified_base 43: mod_base = OTHER; note = uracil
  modified_base 46: mod_base = OTHER; note = uracil
  source 1..51: mol_type = other DNA
tgacaaggcgtagtcacggtnnnactnnntgatccgtggagctcctcacac

SEQ ID NO: 1407 - DNA, 57 bp, synthetic construct
  misc_feature 1..57: note = Synthetic Primer
  misc_difference 21..23: note = n is a, c, g, t or u
  misc_difference 27..29: note = n is a, c, g, t or u
  modified_base 20: mod_base = OTHER; note = uracil
  modified_base 33: mod_base = OTHER; note = uracil
  modified_base 39..40: mod_base = OTHER; note = uracil
  modified_base 44: mod_base = OTHER; note = uracil
  modified_base 46: mod_base = OTHER; note = uracil
  modified_base 49..51: mod_base = OTHER; note = uracil
  modified_base 55: mod_base = OTHER; note = uracil
  source 1..57: mol_type = other DNA
tgacaaggcgtagtcacggtnnnactnnntgatgccaattcactgtggtttaagtgc

SEQ ID NO: 1408 - DNA, 50 bp, synthetic construct
  misc_feature 1..50: note = Synthetic Primer
  misc_difference 21..23: note = n is a, c, g, t or u
  misc_difference 27..29: note = n is a, c, g, t or u
  modified_base 20: mod_base = OTHER; note = uracil
  modified_base 33..34: mod_base = OTHER; note = uracil
  modified_base 40: mod_base = OTHER; note = uracil
  modified_base 44..47: mod_base = OTHER; note = uracil
  source 1..50: mol_type = other DNA
tgacaaggcgtagtcacggtnnnactnnntgattgcacgtcggttttggg

SEQ ID NO: 1409 - DNA, 58 bp, synthetic construct
  misc_feature 1..58: note = Synthetic Primer
  misc_difference 21..23: note = n is a, c, g, t or u
  misc_difference 27..29: note = n is a, c, g, t or u
  modified_base 20: mod_base = OTHER; note = uracil
  modified_base 33: mod_base = OTHER; note = uracil
  modified_base 38: mod_base = OTHER; note = uracil
  modified_base 46: mod_base = OTHER; note = uracil
  modified_base 49: mod_base = OTHER; note = uracil
  modified_base 51: mod_base = OTHER; note = uracil
  modified_base 55: mod_base = OTHER; note = uracil
  modified_base 57: mod_base = OTHER; note = uracil
  source 1..58: mol_type = other DNA
tgacaaggcgtagtcacggtnnnactnnntgatccagtccccaggtaatgtaaatgta

SEQ ID NO: 1410 - DNA, 60 bp, synthetic construct
  misc_feature 1..60: note = Synthetic Primer
  misc_difference 21..23: note = n is a, c, g, t or u
  misc_difference 27..29: note = n is a, c, g, t or u
  modified_base 20: mod_base = OTHER; note = uracil
  modified_base 33: mod_base = OTHER; note = uracil
  modified_base 35: mod_base = OTHER; note = uracil
  modified_base 38: mod_base = OTHER; note = uracil
  modified_base 40: mod_base = OTHER; note = uracil
  modified_base 47..48: mod_base = OTHER; note = uracil
  modified_base 56: mod_base = OTHER; note = uracil
  source 1..60: mol_type = other DNA
tgacaaggcgtagtcacggtnnnactnnntgatctgatctacagagttccaaaagtgaca

SEQ ID NO: 1411 - DNA, 59 bp, synthetic construct
  misc_feature 1..59: note = Synthetic Primer
  misc_difference 21..23: note = n is a, c, g, t or u
  misc_difference 27..29: note = n is a, c, g, t or u
  modified_base 20: mod_base = OTHER; note = uracil
  modified_base 33: mod_base = OTHER; note = uracil
  modified_base 36: mod_base = OTHER; note = uracil
  modified_base 39: mod_base = OTHER; note = uracil
  modified_base 43..44: mod_base = OTHER; note = uracil
  modified_base 46..47: mod_base = OTHER; note = uracil
  modified_base 49..50: mod_base = OTHER; note = uracil
  modified_base 53: mod_base = OTHER; note = uracil
  modified_base 56: mod_base = OTHER; note = uracil
  source 1..59: mol_type = other DNA
tgacaaggcgtagtcacggtnnnactnnntgatactaatgaattcttcttcctgctcag

SEQ ID NO: 1412 - DNA, 54 bp, synthetic construct
  misc_feature 1..54: note = Synthetic Primer
  misc_difference 21..23: note = n is a, c, g, t or u
  misc_difference 27..29: note = n is a, c, g, t or u
  modified_base 20: mod_base = OTHER; note = uracil
  modified_base 33: mod_base = OTHER; note = uracil
  modified_base 36..37: mod_base = OTHER; note = uracil
  modified_base 40: mod_base = OTHER; note = uracil
  modified_base 51: mod_base = OTHER; note = uracil
  source 1..54: mol_type = other DNA
tgacaaggcgtagtcacggtnnnactnnntgatacttcctacaggaagcctccc

SEQ ID NO: 1413 - DNA, 56 bp, synthetic construct
  misc_feature 1..56: note = Synthetic Primer
  misc_difference 21..23: note = n is a, c, g, t or u
  misc_difference 27..29: note = n is a, c, g, t or u
  modified_base 20: mod_base = OTHER; note = uracil
  modified_base 33: mod_base = OTHER; note = uracil
  modified_base 35: mod_base = OTHER; note = uracil
  modified_base 41: mod_base = OTHER; note = uracil
  modified_base 47: mod_base = OTHER; note = uracil
  source 1..56: mol_type = other DNA
tgacaaggcgtagtcacggtnnnactnnntgatgtaacaataccagtgaagacccg

SEQ ID NO: 1414 - DNA, 54 bp, synthetic construct
  misc_feature 1..54: note = Synthetic Primer
  misc_difference 21..23: note = n is a, c, g, t or u
  misc_difference 27..29: note = n is a, c, g, t or u
  modified_base 20: mod_base = OTHER; note = uracil
  modified_base 33..34: mod_base = OTHER; note = uracil
  modified_base 45: mod_base = OTHER; note = uracil
  modified_base 47: mod_base = OTHER; note = uracil
  modified_base 51: mod_base = OTHER; note = uracil
  modified_base 53: mod_base = OTHER; note = uracil
  source 1..54: mol_type = other DNA
tgacaaggcgtagtcacggtnnnactnnntgattggccaagcaatctgcgtatt

SEQ ID NO: 1415 - DNA, 58 bp, synthetic construct
  misc_feature 1..58: note = Synthetic Primer
  misc_difference 21..23: note = n is a, c, g, t or u
  misc_difference 27..29: note = n is a, c, g, t or u
  modified_base 20: mod_base = OTHER; note = uracil
  modified_base 33: mod_base = OTHER; note = uracil
  modified_base 35: mod_base = OTHER; note = uracil
  modified_base 39..41: mod_base = OTHER; note = uracil
  modified_base 44: mod_base = OTHER; note = uracil
  modified_base 47: mod_base = OTHER; note = uracil
  modified_base 50: mod_base = OTHER; note = uracil
  modified_base 52: mod_base = OTHER; note = uracil
  modified_base 57: mod_base = OTHER; note = uracil
  source 1..58: mol_type = other DNA
tgacaaggcgtagtcacggtnnnactnnntgatctaggtttcatgctcatatccggtc

SEQ ID NO: 1416 - DNA, 52 bp, synthetic construct
  misc_feature 1..52: note = Synthetic Primer
  misc_difference 21..23: note = n is a, c, g, t or u
  misc_difference 27..29: note = n is a, c, g, t or u
  modified_base 20: mod_base = OTHER; note = uracil
  modified_base 33: mod_base = OTHER; note = uracil
  modified_base 35: mod_base = OTHER; note = uracil
  modified_base 39..40: mod_base = OTHER; note = uracil
  modified_base 42: mod_base = OTHER; note = uracil
  modified_base 49: mod_base = OTHER; note = uracil
  source 1..52: mol_type = other DNA
tgacaaggcgtagtcacggtnnnactnnntgatctgccttgtcccacatcag

SEQ ID NO: 1417 - DNA, 50 bp, synthetic construct
  misc_feature 1..50: note = Synthetic Primer
  misc_difference 21..23: note = n is a, c, g, t or u
  misc_difference 27..29: note = n is a, c, g, t or u
  modified_base 20: mod_base = OTHER; note = uracil
  modified_base 33..34: mod_base = OTHER; note = uracil
  modified_base 41: mod_base = OTHER; note = uracil
  modified_base 44: mod_base = OTHER; note = uracil
  source 1..50: mol_type = other DNA
tgacaaggcgtagtcacggtnnnactnnntgattccacgctgctcggcat

SEQ ID NO: 1418 - DNA, 52 bp, synthetic construct
  misc_feature 1..52: note = Synthetic Primer
  misc_difference 21..23: note = n is a, c, g, t or u
  misc_difference 27..29: note = n is a, c, g, t or u
  modified_base 20: mod_base = OTHER; note = uracil
  modified_base 33: mod_base = OTHER; note = uracil
  modified_base 37: mod_base = OTHER; note = uracil
  modified_base 39: mod_base = OTHER; note = uracil
  modified_base 42..43: mod_base = OTHER; note = uracil
  modified_base 47: mod_base = OTHER; note = uracil
  source 1..52: mol_type = other DNA
tgacaaggcgtagtcacggtnnnactnnntgatcgatgtcattcgctgcagt

SEQ ID NO: 1419 - DNA, 51 bp, synthetic construct
  misc_feature 1..51: note = Synthetic Primer
  misc_difference 21..23: note = n is a, c, g, t or u
  misc_difference 27..29: note = n is a, c, g, t or u
  modified_base 20: mod_base = OTHER; note = uracil
  modified_base 33: mod_base = OTHER; note = uracil
  modified_base 35: mod_base = OTHER; note = uracil
  modified_base 42: mod_base = OTHER; note = uracil
  source 1..51: mol_type = other DNA
tgacaaggcgtagtcacggtnnnactnnntgatatgccaggtgcaagcaca

SEQ ID NO: 1420 - DNA, 60 bp, synthetic construct
  misc_feature 1..60: note = Synthetic Primer
  misc_difference 21..23: note = n is a, c, g, t or u
  misc_difference 27..29: note = n is a, c, g, t or u
  modified_base 20: mod_base = OTHER; note = uracil
  modified_base 33: mod_base = OTHER; note = uracil
  modified_base 35: mod_base = OTHER; note = uracil
  modified_base 40..41: mod_base = OTHER; note = uracil
  modified_base 46: mod_base = OTHER; note = uracil
  modified_base 50..53: mod_base = OTHER; note = uracil
  source 1..60: mol_type = other DNA
tgacaaggcgtagtcacggtnnnactnnntgatgtggaattggaatggattttgaaggag

SEQ ID NO: 1421 - DNA, 52 bp, synthetic construct
  misc_feature 1..52: note = Synthetic Primer
  misc_difference 21..23: note = n is a, c, g, t or u
  misc_difference 27..29: note = n is a, c, g, t or u
  modified_base 20: mod_base = OTHER; note = uracil
  modified_base 33..34: mod_base = OTHER; note = uracil
  modified_base 39: mod_base = OTHER; note = uracil
  modified_base 41: mod_base = OTHER; note = uracil
  modified_base 44..45: mod_base = OTHER; note = uracil
  modified_base 49: mod_base = OTHER; note = uracil
  source 1..52: mol_type = other DNA
tgacaaggcgtagtcacggtnnnactnnntgattgggatctccttgggtgcc

SEQ ID NO: 1422 - DNA, 61 bp, synthetic construct
  misc_feature 1..61: note = Synthetic Primer
  misc_difference 21..23: note = n is a, c, g, t or u
  misc_difference 27..29: note = n is a, c, g, t or u
  modified_base 20: mod_base = OTHER; note = uracil
  modified_base 33: mod_base = OTHER; note = uracil
  modified_base 38..42: mod_base = OTHER; note = uracil
  modified_base 55..56: mod_base = OTHER; note = uracil
  modified_base 58..59: mod_base = OTHER; note = uracil
  source 1..61: mol_type = other DNA
tgacaaggcgtagtcacggtnnnactnnntgatagagtttttccaagaaccaagttcttcc

SEQ ID NO: 1423 - DNA, 50 bp, synthetic construct
  misc_feature 1..50: note = Synthetic Primer
  misc_difference 21..23: note = n is a, c, g, t or u
  misc_difference 27..29: note = n is a, c, g, t or u
  modified_base 20: mod_base = OTHER; note = uracil
  modified_base 33: mod_base = OTHER; note = uracil
  modified_base 35: mod_base = OTHER; note = uracil
  modified_base 38..39: mod_base = OTHER; note = uracil
  modified_base 44: mod_base = OTHER; note = uracil
  source 1..50: mol_type = other DNA
tgacaaggcgtagtcacggtnnnactnnntgatctgcttggcctggaggg

SEQ ID NO: 1424 - DNA, 55 bp, synthetic construct
  misc_feature 1..55: note = Synthetic Primer
  misc_difference 21..23: note = n is a, c, g, t or u
  misc_difference 27..29: note = n is a, c, g, t or u
  modified_base 20: mod_base = OTHER; note = uracil
  modified_base 33: mod_base = OTHER; note = uracil
  modified_base 37..38: mod_base = OTHER; note = uracil
  modified_base 40: mod_base = OTHER; note = uracil
  modified_base 43: mod_base = OTHER; note = uracil
  modified_base 47: mod_base = OTHER; note = uracil
  modified_base 50: mod_base = OTHER; note = uracil
  modified_base 53: mod_base = OTHER; note = uracil
  source 1..55: mol_type = other DNA
tgacaaggcgtagtcacggtnnnactnnntgatgggttgtagtcggtcatgatgg

SEQ ID NO: 1425 - DNA, 59 bp, synthetic construct
  misc_feature 1..59: note = Synthetic Primer
  misc_difference 21..23: note = n is a, c, g, t or u
  misc_difference 27..29: note = n is a, c, g, t or u
  modified_base 20: mod_base = OTHER; note = uracil
  modified_base 33: mod_base = OTHER; note = uracil
  modified_base 38: mod_base = OTHER; note = uracil
  modified_base 40: mod_base = OTHER; note = uracil
  modified_base 43: mod_base = OTHER; note = uracil
  modified_base 45..46: mod_base = OTHER; note = uracil
  modified_base 50: mod_base = OTHER; note = uracil
  modified_base 58: mod_base = OTHER; note = uracil
  source 1..59: mol_type = other DNA
tgacaaggcgtagtcacggtnnnactnnntgatgccatctcctcttgcataaacaagtt

SEQ ID NO: 1426 - DNA, 55 bp, synthetic construct
  misc_feature 1..55: note = Synthetic Primer
  misc_difference 21..23: note = n is a, c, g, t or u
  misc_difference 27..29: note = n is a, c, g, t or u
  modified_base 20: mod_base = OTHER; note = uracil
  modified_base 33: mod_base = OTHER; note = uracil
  modified_base 36: mod_base = OTHER; note = uracil
  modified_base 39: mod_base = OTHER; note = uracil
  modified_base 41..42: mod_base = OTHER; note = uracil
  modified_base 51..52: mod_base = OTHER; note = uracil
  source 1..55: mol_type = other DNA
tgacaaggcgtagtcacggtnnnactnnntgatggtggtgttcaaagaacttgga

SEQ ID NO: 1427 - DNA, 52 bp, synthetic construct
  misc_feature 1..52: note = Synthetic Primer
  misc_difference 21..23: note = n is a, c, g, t or u
  misc_difference 27..29: note = n is a, c, g, t or u
  modified_base 20: mod_base = OTHER; note = uracil
  modified_base 33: mod_base = OTHER; note = uracil
  modified_base 37..38: mod_base = OTHER; note = uracil
  modified_base 43: mod_base = OTHER; note = uracil
  source 1..52: mol_type = other DNA
tgacaaggcgtagtcacggtnnnactnnntgatgagttgaactggcggccat

SEQ ID NO: 1428 - DNA, 51 bp, synthetic construct
  misc_feature 1..51: note = Synthetic Primer
  misc_difference 21..23: note = n is a, c, g, t or u
  misc_difference 27..29: note = n is a, c, g, t or u
  modified_base 20: mod_base = OTHER; note = uracil
  modified_base 33: mod_base = OTHER; note = uracil
  modified_base 36: mod_base = OTHER; note = uracil
  modified_base 39: mod_base = OTHER; note = uracil
  modified_base 41: mod_base = OTHER; note = uracil
  source 1..51: mol_type = other DNA
tgacaaggcgtagtcacggtnnnactnnntgatgctcgtgtcccccaacaa

SEQ ID NO: 1429 - DNA, 55 bp, synthetic construct
  misc_feature 1..55: note = Synthetic Primer
  misc_difference 21..23: note = n is a, c, g, t or u
  misc_difference 27..29: note = n is a, c, g, t or u
  modified_base 20: mod_base = OTHER; note = uracil
  modified_base 33: mod_base = OTHER; note = uracil
  modified_base 38: mod_base = OTHER; note = uracil
  modified_base 40: mod_base = OTHER; note = uracil
  modified_base 42: mod_base = OTHER; note = uracil
  modified_base 48: mod_base = OTHER; note = uracil
  modified_base 50: mod_base = OTHER; note = uracil
  modified_base 54: mod_base = OTHER; note = uracil
  source 1..55: mol_type = other DNA
tgacaaggcgtagtcacggtnnnactnnntgatagactgtctcggactgtaactc

SEQ ID NO: 1430 - DNA, 57 bp, synthetic construct
  misc_feature 1..57: note = Synthetic Primer
  misc_difference 21..23: note = n is a, c, g, t or u
  misc_difference 27..29: note = n is a, c, g, t or u
  modified_base 20: mod_base = OTHER; note = uracil
  modified_base 33: mod_base = OTHER; note = uracil
  modified_base 35: mod_base = OTHER; note = uracil
  modified_base 38..39: mod_base = OTHER; note = uracil
  modified_base 41: mod_base = OTHER; note = uracil
  modified_base 49..52: mod_base = OTHER; note = uracil
  source 1..57: mol_type = other DNA
tgacaaggcgtagtcacggtnnnactnnntgatctccttctccgcacattttacaag

SEQ ID NO: 1431 - DNA, 58 bp, synthetic construct
  misc_feature 1..58: note = Synthetic Primer
  misc_difference 21..23: note = n is a, c, g, t or u
  misc_difference 27..29: note = n is a, c, g, t or u
  modified_base 20: mod_base = OTHER; note = uracil
  modified_base 33..34: mod_base = OTHER; note = uracil
  modified_base 41..43: mod_base = OTHER; note = uracil
  modified_base 47: mod_base = OTHER; note = uracil
  modified_base 54..57: mod_base = OTHER; note = uracil
  source 1..58: mol_type = other DNA
tgacaaggcgtagtcacggtnnnactnnntgattaaggcatttcgctcaacacttttc

SEQ ID NO: 1432 - DNA, 57 bp, synthetic construct
  misc_feature 1..57: note = Synthetic Primer
  misc_difference 21..23: note = n is a, c, g, t or u
  misc_difference 27..29: note = n is a, c, g, t or u
  modified_base 20: mod_base = OTHER; note = uracil
  modified_base 33..34: mod_base = OTHER; note = uracil
  modified_base 36: mod_base = OTHER; note = uracil
  modified_base 39: mod_base = OTHER; note = uracil
  modified_base 41: mod_base = OTHER; note = uracil
  modified_base 45..48: mod_base = OTHER; note = uracil
  modified_base 52..54: mod_base = OTHER; note = uracil
  modified_base 56: mod_base = OTHER; note = uracil
  source 1..57: mol_type = other DNA
tgacaaggcgtagtcacggtnnnactnnntgattgtgctgtccattttcactttctg

SEQ ID NO: 1433 - DNA, 53 bp, synthetic construct
  misc_feature 1..53: note = Synthetic Primer
  misc_difference 21..23: note = n is a, c, g, t or u
  misc_difference 27..29: note = n is a, c, g, t or u
  modified_base 20: mod_base = OTHER; note = uracil
  modified_base 33: mod_base = OTHER; note = uracil
  modified_base 35: mod_base = OTHER; note = uracil
  modified_base 37: mod_base = OTHER; note = uracil
  modified_base 48..49: mod_base = OTHER; note = uracil
  modified_base 51..52: mod_base = OTHER; note = uracil
  source 1..53: mol_type = other DNA
tgacaaggcgtagtcacggtnnnactnnntgatgtctggacgcccgattcttc

SEQ ID NO: 1434 - DNA, 50 bp, synthetic construct
  misc_feature 1..50: note = Synthetic Primer
  misc_difference 21..23: note = n is a, c, g, t or u
  misc_difference 27..29: note = n is a, c, g, t or u
  modified_base 20: mod_base = OTHER; note = uracil
  modified_base 33: mod_base = OTHER; note = uracil
  modified_base 40: mod_base = OTHER; note = uracil
  modified_base 42: mod_base = OTHER; note = uracil
  modified_base 44..45: mod_base = OTHER; note = uracil
  source 1..50: mol_type = other DNA
tgacaaggcgtagtcacggtnnnactnnntgatggcccgtgtcttggagg

SEQ ID NO: 1435 - DNA, 56 bp, synthetic construct
  misc_feature 1..56: note = Synthetic Primer
  misc_difference 21..23: note = n is a, c, g, t or u
  misc_difference 27..29: note = n is a, c, g, t or u
  modified_base 20: mod_base = OTHER; note = uracil
  modified_base 33..35: mod_base = OTHER; note = uracil
  modified_base 45: mod_base = OTHER; note = uracil
  modified_base 47..48: mod_base = OTHER; note = uracil
  modified_base 51..53: mod_base = OTHER; note = uracil
  modified_base 55: mod_base = OTHER; note = uracil
  source 1..56: mol_type = other DNA
tgacaaggcgtagtcacggtnnnactnnntgatttcaacacagctgttggtttctc

SEQ ID NO: 1436 - DNA, 57 bp, synthetic construct
  misc_feature 1..57: note = Synthetic Primer
  misc_difference 21..23: note = n is a, c, g, t or u
  misc_difference 27..29: note = n is a, c, g, t or u
  modified_base 20: mod_base = OTHER; note = uracil
  modified_base 33..34: mod_base = OTHER; note = uracil
  modified_base 41: mod_base = OTHER; note = uracil
  modified_base 48: mod_base = OTHER; note = uracil
  modified_base 53: mod_base = OTHER; note = uracil
  modified_base 56: mod_base = OTHER; note = uracil
  source 1..57: mol_type = other DNA
tgacaaggcgtagtcacggtnnnactnnntgattagcaggtcaaaagtgaactgatg

SEQ ID NO: 1437 - DNA, 58 bp, synthetic construct
  misc_feature 1..58: note = Synthetic Primer
  misc_difference 21..23: note = n is a, c, g, t or u
  misc_difference 27..29: note = n is a, c, g, t or u
  modified_base 20: mod_base = OTHER; note = uracil
  modified_base 33: mod_base = OTHER; note = uracil
  modified_base 36..37: mod_base = OTHER; note = uracil
  modified_base 40: mod_base = OTHER; note = uracil
  modified_base 45: mod_base = OTHER; note = uracil
  modified_base 47: mod_base = OTHER; note = uracil
  modified_base 49: mod_base = OTHER; note = uracil
  modified_base 51..52: mod_base = OTHER; note = uracil
  modified_base 54: mod_base = OTHER; note = uracil
  source 1..58: mol_type = other DNA
tgacaaggcgtagtcacggtnnnactnnntgatcattcatcagctgtgtgttctgaat

SEQ ID NO: 1438 - DNA, 54 bp, synthetic construct
  misc_feature 1..54: note = Synthetic Primer
  misc_difference 21..23: note = n is a, c, g, t or u
  misc_difference 27..29: note = n is a, c, g, t or u
  modified_base 20: mod_base = OTHER; note = uracil
  modified_base 33: mod_base = OTHER; note = uracil
  modified_base 35: mod_base = OTHER; note = uracil
  modified_base 39: mod_base = OTHER; note = uracil
  modified_base 42: mod_base = OTHER; note = uracil
  modified_base 46: mod_base = OTHER; note = uracil
  modified_base 49: mod_base = OTHER; note = uracil
  modified_base 53: mod_base = OTHER; note = uracil
  source 1..54: mol_type = other DNA
tgacaaggcgtagtcacggtnnnactnnntgatctccatcctgagtcatggctt

SEQ ID NO: 1439 - DNA, 55 bp, synthetic construct
  misc_feature 1..55: note = Synthetic Primer
  misc_difference 21..23: note = n is a, c, g, t or u
  misc_difference 27..29: note = n is a, c, g, t or u
  modified_base 20: mod_base = OTHER; note = uracil
  modified_base 33: mod_base = OTHER; note = uracil
  modified_base 38..39: mod_base = OTHER; note = uracil
  modified_base 43: mod_base = OTHER; note = uracil
  modified_base 45: mod_base = OTHER; note = uracil
  modified_base 49: mod_base = OTHER; note = uracil
  modified_base 51: mod_base = OTHER; note = uracil
  modified_base 53: mod_base = OTHER; note = uracil
  source 1..55: mol_type = other DNA
tgacaaggcgtagtcacggtnnnactnnntgatgagcttccctctggatctctca

SEQ ID NO: 1440 - DNA, 51 bp, synthetic construct
  misc_feature 1..51: note = Synthetic Primer
  misc_difference 21..23: note = n is a, c, g, t or u
  misc_difference 27..29: note = n is a, c, g, t or u
  modified_base 20: mod_base = OTHER; note = uracil
  modified_base 33: mod_base = OTHER; note = uracil
  modified_base 35: mod_base = OTHER; note = uracil
  modified_base 38..39: mod_base = OTHER; note = uracil
  modified_base 42: mod_base = OTHER; note = uracil
  source 1..51: mol_type = other DNA
tgacaaggcgtagtcacggtnnnactnnntgatctgcttcctcaaggccga

SEQ ID NO: 1441 - DNA, 62 bp, synthetic construct
  misc_feature 1..62: note = Synthetic Primer
  misc_difference 21..23: note = n is a, c, g, t or u
  misc_difference 27..29: note = n is a, c, g, t or u
  modified_base 20: mod_base = OTHER; note = uracil
  modified_base 33: mod_base = OTHER; note = uracil
  modified_base 35..39: mod_base = OTHER; note = uracil
  modified_base 41: mod_base = OTHER; note = uracil
  modified_base 45: mod_base = OTHER; note = uracil
  modified_base 58: mod_base = OTHER; note = uracil
  modified_base 60..61: mod_base = OTHER; note = uracil
  source 1..62: mol_type = other DNA
tgacaaggcgtagtcacggtnnnactnnntgatgtttttctggataaaaagagccactgttc

SEQ ID NO: 1442 - DNA, 50 bp, synthetic construct
  misc_feature 1..50: note = Synthetic Primer
  misc_difference 21..23: note = n is a, c, g, t or u
  misc_difference 27..29: note = n is a, c, g, t or u
  modified_base 20: mod_base = OTHER; note = uracil
  modified_base 33: mod_base = OTHER; note = uracil
  modified_base 36: mod_base = OTHER; note = uracil
  modified_base 39..40: mod_base = OTHER; note = uracil
  modified_base 43: mod_base = OTHER; note = uracil
  modified_base 47: mod_base = OTHER; note = uracil
  source 1..50: mol_type = other DNA
tgacaaggcgtagtcacggtnnnactnnntgatactggttggtggctgga

SEQ ID NO: 1443 - DNA, 60 bp, synthetic construct
  misc_feature 1..60: note = Synthetic Primer
  misc_difference 21..23: note = n is a, c, g, t or u
  misc_difference 27..29: note = n is a, c, g, t or u
  modified_base 20: mod_base = OTHER; note = uracil
  modified_base 33: mod_base = OTHER; note = uracil
  modified_base 35..36: mod_base = OTHER; note = uracil
  modified_base 39..41: mod_base = OTHER; note = uracil
  modified_base 43..46: mod_base = OTHER; note = uracil
  modified_base 49: mod_base = OTHER; note = uracil
  modified_base 55..56: mod_base = OTHER; note = uracil
  modified_base 58: mod_base = OTHER; note = uracil
  source 1..60: mol_type = other DNA
tgacaaggcgtagtcacggtnnnactnnntgatcttgatttcttttactgacccttctgc

SEQ ID NO: 1444 - DNA, 52 bp, synthetic construct
  misc_feature 1..52: note = Synthetic Primer
  misc_difference 21..23: note = n is a, c, g, t or u
  misc_difference 27..29: note = n is a, c, g, t or u
  modified_base 20: mod_base = OTHER; note = uracil
  modified_base 33: mod_base = OTHER; note = uracil
  modified_base 37: mod_base = OTHER; note = uracil
  modified_base 40: mod_base = OTHER; note = uracil
  modified_base 46: mod_base = OTHER; note = uracil
  modified_base 49: mod_base = OTHER; note = uracil
  source 1..52: mol_type = other DNA
tgacaaggcgtagtcacggtnnnactnnntgatagatgctgcagatgctgct

SEQ ID NO: 1445 - DNA, 52 bp, synthetic construct
  misc_feature 1..52: note = Synthetic Primer
  misc_difference 21..23: note = n is a, c, g, t or u
  misc_difference 27..29: note = n is a, c, g, t or u
  modified_base 20: mod_base = OTHER; note = uracil
  modified_base 33: mod_base = OTHER; note = uracil
  modified_base 37: mod_base = OTHER; note = uracil
  modified_base 41: mod_base = OTHER; note = uracil
  modified_base 43: mod_base = OTHER; note = uracil
  modified_base 47: mod_base = OTHER; note = uracil
  modified_base 51: mod_base = OTHER; note = uracil
  source 1..52: mol_type = other DNA
tgacaaggcgtagtcacggtnnnactnnntgatagctccatctgcatggctt

SEQ ID NO: 1446 - DNA, 65 bp, synthetic construct
  misc_feature 1..65: note = Synthetic Primer
  misc_difference 21..23: note = n is a, c, g, t or u
  misc_difference 27..29: note = n is a, c, g, t or u
  modified_base 20: mod_base = OTHER; note = uracil
  modified_base 33: mod_base = OTHER; note = uracil
  modified_base 35: mod_base = OTHER; note = uracil
  modified_base 37..38: mod_base = OTHER; note = uracil
  modified_base 46..47: mod_base = OTHER; note = uracil
  modified_base 49: mod_base = OTHER; note = uracil
  modified_base 53..55: mod_base = OTHER; note = uracil
  modified_base 63: mod_base = OTHER; note = uracil
  source 1..65: mol_type = other DNA
tgacaaggcgtagtcacggtnnnactnnntgatctgttcaagaacttctgaatttaaaacagtct

SEQ ID NO: 1447 - DNA, 63 bp, synthetic construct
  misc_feature 1..63: note = Synthetic Primer
  misc_difference 21..23: note = n is a, c, g, t or u
  misc_difference 27..29: note = n is a, c, g, t or u
  modified_base 20: mod_base = OTHER; note = uracil
  modified_base 33..34: mod_base = OTHER; note = uracil
  modified_base 38: mod_base = OTHER; note = uracil
  modified_base 41: mod_base = OTHER; note = uracil
  modified_base 44..45: mod_base = OTHER; note = uracil
  modified_base 48: mod_base = OTHER; note = uracil
  modified_base 50..51: mod_base = OTHER; note = uracil
  modified_base 55..56: mod_base = OTHER; note = uracil
  modified_base 62: mod_base = OTHER; note = uracil
  source 1..63: mol_type = other DNA
tgacaaggcgtagtcacggtnnnactnnntgattagataatgcttaatattcacttccccgtg

SEQ ID NO: 1448 - DNA, 51 bp, synthetic construct
  misc_feature 1..51: note = Synthetic Primer
  misc_difference 21..23: note = n is a, c, g, t or u
  misc_difference 27..29: note = n is a, c, g, t or u
  modified_base 20: mod_base = OTHER; note = uracil
  modified_base 33: mod_base = OTHER; note = uracil
  modified_base 40: mod_base = OTHER; note = uracil
  modified_base 47: mod_base = OTHER; note = uracil
  modified_base 50: mod_base = OTHER; note = uracil
  source 1..51: mol_type = other DNA
tgacaaggcgtagtcacggtnnnactnnntgatcaggagtccgaggtggtg

SEQ ID NO: 1449 - DNA, 50 bp, synthetic construct
  misc_feature 1..50: note = Synthetic Primer
  misc_difference 21..23: note = n is a, c, g, t or u
  misc_difference 27..29: note = n is a, c, g, t or u
  modified_base 20: mod_base = OTHER; note = uracil
  modified_base 33: mod_base = OTHER; note = uracil
  modified_base 35: mod_base = OTHER; note = uracil
  modified_base 49: mod_base = OTHER; note = uracil
  source 1..50: mol_type = other DNA
tgacaaggcgtagtcacggtnnnactnnntgatgtcagccagggcacctg

SEQ ID NO: 1450 - DNA, 50 bp, synthetic construct
  misc_feature 1..50: note = Synthetic Primer
  misc_difference 21..23: note = n is a, c, g, t or u
  misc_difference 27..29: note = n is a, c, g, t or u
  modified_base 20: mod_base = OTHER; note = uracil
  modified_base 33: mod_base = OTHER; note = uracil
  modified_base 36: mod_base = OTHER; note = uracil
  modified_base 38: mod_base = OTHER; note = uracil
  modified_base 47..48: mod_base = OTHER; note = uracil
  source 1..50: mol_type = other DNA
tgacaaggcgtagtcacggtnnnactnnntgatgatgtcccggcgcttga

SEQ ID NO: 1451 - DNA, 52 bp, synthetic construct
  misc_feature 1..52: note = Synthetic Primer
  misc_difference 21..23: note = n is a, c, g, t or u
  misc_difference 27..29: note = n is a, c, g, t or u
  modified_base 20: mod_base = OTHER; note = uracil
  modified_base 33: mod_base = OTHER; note = uracil
  modified_base 35: mod_base = OTHER; note = uracil
  modified_base 41: mod_base = OTHER; note = uracil
  source 1..52: mol_type = other DNA
tgacaaggcgtagtcacggtnnnactnnntgatgtcgggatggagaaagcga

SEQ ID NO: 1452 - DNA, 57 bp, synthetic construct
  misc_feature 1..57: note = Synthetic Primer
  misc_difference 21..23: note = n is a, c, g, t or u
  misc_difference 27..29: note = n is a, c, g, t or u
  modified_base 20: mod_base = OTHER; note = uracil
  modified_base 33: mod_base = OTHER; note = uracil
  modified_base 36: mod_base = OTHER; note = uracil
  modified_base 40: mod_base = OTHER; note = uracil
  modified_base 43: mod_base = OTHER; note = uracil
  modified_base 47..48: mod_base = OTHER; note = uracil
  modified_base 50..51: mod_base = OTHER; note = uracil
  modified_base 53: mod_base = OTHER; note = uracil
  modified_base 55..56: mod_base = OTHER; note = uracil
  source 1..57: mol_type = other DNA
tgacaaggcgtagtcacggtnnnactnnntgatggtggctaatagcttcttctgttc

SEQ ID NO: 1453 - DNA, 56 bp, synthetic construct
  misc_feature 1..56: note = Synthetic Primer
  misc_difference 21..23: note = n is a, c, g, t or u
  misc_difference 27..29: note = n is a, c, g, t or u
  modified_base 20: mod_base = OTHER; note = uracil
  modified_base 33: mod_base = OTHER; note = uracil
  modified_base 40: mod_base = OTHER; note = uracil
  modified_base 43: mod_base = OTHER; note = uracil
  modified_base 49: mod_base = OTHER; note = uracil
  modified_base 52: mod_base = OTHER; note = uracil
  source 1..56: mol_type = other DNA
tgacaaggcgtagtcacggtnnnactnnntgatccaaactgctccaggtaatccac

SEQ ID NO: 1454 - DNA, 51 bp, synthetic construct
  misc_feature 1..51: note = Synthetic Primer
  misc_difference 21..23: note = n is a, c, g, t or u
  misc_difference 27..29: note = n is a, c, g, t or u
  modified_base 20: mod_base = OTHER; note = uracil
  modified_base 33: mod_base = OTHER; note = uracil
  modified_base 38: mod_base = OTHER; note = uracil
  modified_base 44: mod_base = OTHER; note = uracil
  modified_base 46: mod_base = OTHER; note = uracil
  modified_base 48: mod_base = OTHER; note = uracil
  modified_base 50: mod_base = OTHER; note = uracil
  source 1..51: mol_type = other DNA
tgacaaggcgtagtcacggtnnnactnnntgatgccatgcgggtctctctg

SEQ ID NO: 1455 - DNA, 54 bp, synthetic construct
  misc_feature 1..54: note = Synthetic Primer
  misc_difference 21..23: note = n is a, c, g, t or u
  misc_difference 27..29: note = n is a, c, g, t or u
  modified_base 20: mod_base = OTHER; note = uracil
  modified_base 33: mod_base = OTHER; note = uracil
  modified_base 35..36: mod_base = OTHER; note = uracil
  modified_base 41: mod_base = OTHER; note = uracil
  modified_base 45: mod_base = OTHER; note = uracil
  modified_base 49..52: mod_base = OTHER; note = uracil
  source 1..54: mol_type = other DNA
tgacaaggcgtagtcacggtnnnactnnntgatcttcgcctagctcccttttca

SEQ ID NO: 1456 - DNA, 59 bp, synthetic construct
  misc_feature 1..59: note = Synthetic Primer
  misc_difference 21..23: note = n is a, c, g, t or u
  misc_difference 27..29: note = n is a, c, g, t or u
  modified_base 20: mod_base = OTHER; note = uracil
  modified_base 33..34: mod_base = OTHER; note = uracil
  modified_base 37: mod_base = OTHER; note = uracil
  modified_base 40..42: mod_base = OTHER; note = uracil
  modified_base 44..45: mod_base = OTHER; note = uracil
  modified_base 48: mod_base = OTHER; note = uracil
  modified_base 55..56: mod_base = OTHER; note = uracil
  modified_base 58: mod_base = OTHER; note = uracil
  source 1..59: mol_type = other DNA
tgacaaggcgtagtcacggtnnnactnnntgattgatgctttgttaatgcgaagttctg

SEQ ID NO: 1457 - DNA, 54 bp, synthetic construct
  misc_feature 1..54: note = Synthetic Primer
  misc_difference 21..23: note = n is a, c, g, t or u
  misc_difference 27..29: note = n is a, c, g, t or u
  modified_base 20: mod_base = OTHER; note = uracil
  modified_base 33..34: mod_base = OTHER; note = uracil
  modified_base 41..42: mod_base = OTHER; note = uracil
  modified_base 44: mod_base = OTHER; note = uracil
  source 1..54: mol_type = other DNA
tgacaaggcgtagtcacggtnnnactnnntgattcccaaattctgccaggaagc

SEQ ID NO: 1458 - DNA, 53 bp, synthetic construct
  misc_feature 1..53: note = Synthetic Primer
  misc_difference 21..23: note = n is a, c, g, t or u
  misc_difference 27..29: note = n is a, c, g, t or u
  modified_base 20: mod_base = OTHER; note = uracil
  modified_base 33..34: mod_base = OTHER; note = uracil
  modified_base 36..37: mod_base = OTHER; note = uracil
  modified_base 45: mod_base = OTHER; note = uracil
  source 1..53: mol_type = other DNA
tgacaaggcgtagtcacggtnnnactnnntgattcttgaaggcatccacggag

SEQ ID NO: 1459 - DNA, 53 bp, synthetic construct
  misc_feature 1..53: note = Synthetic Primer
  misc_difference 21..23: note = n is a, c, g, t or u
  misc_difference 27..29: note = n is a, c, g, t or u
  modified_base 20: mod_base = OTHER; note = uracil
  modified_base 33: mod_base = OTHER; note = uracil
  modified_base 35..36: mod_base = OTHER; note = uracil
  modified_base 38..39: mod_base = OTHER; note = uracil
  modified_base 41: mod_base = OTHER; note = uracil
  modified_base 50: mod_base = OTHER; note = uracil
  modified_base 52: mod_base = OTHER; note = uracil
  source 1..53: mol_type = other DNA
tgacaaggcgtagtcacggtnnnactnnntgatcttcttctccaccgggtctc

SEQ ID NO: 1460 - DNA, 56 bp, synthetic construct
  misc_feature 1..56: note = Synthetic Primer
  misc_difference 21..23: note = n is a, c, g, t or u
  misc_difference 27..29: note = n is a, c, g, t or u
  modified_base 20: mod_base = OTHER; note = uracil
  modified_base 33: mod_base = OTHER; note = uracil
  modified_base 36: mod_base = OTHER; note = uracil
  modified_base 47: mod_base = OTHER; note = uracil
  modified_base 50..51: mod_base = OTHER; note = uracil
  modified_base 54: mod_base = OTHER; note = uracil
  source 1..56: mol_type = other DNA
tgacaaggcgtagtcacggtnnnactnnntgatcatcaccacgaaatccttggtct

SEQ ID NO: 1461 - DNA, 59 bp, synthetic construct
  misc_feature 1..59: note = Synthetic Primer
  misc_difference 21..23: note = n is a, c, g, t or u
  misc_difference 27..29: note = n is a, c, g, t or u
  modified_base 20: mod_base = OTHER; note = uracil
  modified_base 33: mod_base = OTHER; note = uracil
  modified_base 35: mod_base = OTHER; note = uracil
  modified_base 38: mod_base = OTHER; note = uracil
  modified_base 44: mod_base = OTHER; note = uracil
  modified_base 52: mod_base = OTHER; note = uracil
  modified_base 54: mod_base = OTHER; note = uracil
  modified_base 56: mod_base = OTHER; note = uracil
  source 1..59: mol_type = other DNA
tgacaaggcgtagtcacggtnnnactnnntgatctcgtacaagtcacaaagtgtatcca

SEQ ID NO: 1462 - DNA, 51 bp, synthetic construct
  misc_feature 1..51: note = Synthetic Primer
  misc_difference 21..23: note = n is a, c, g, t or u
  misc_difference 27..29: note = n is a, c, g, t or u
  modified_base 20: mod_base = OTHER; note = uracil
  modified_base 33: mod_base = OTHER; note = uracil
  modified_base 38: mod_base = OTHER; note = uracil
  modified_base 44: mod_base = OTHER; note = uracil
  modified_base 47..48: mod_base = OTHER; note = uracil
  source 1..51: mol_type = other DNA
tgacaaggcgtagtcacggtnnnactnnntgatccagtagcgctgcttcct

SEQ ID NO: 1463 - DNA, 59 bp, synthetic construct
  misc_feature 1..59: note = Synthetic Primer
  misc_difference 21..23: note = n is a, c, g, t or u
  misc_difference 27..29: note = n is a, c, g, t or u
  modified_base 20: mod_base = OTHER; note = uracil
  modified_base 33..37: mod_base = OTHER; note = uracil
  modified_base 39: mod_base = OTHER; note = uracil
  modified_base 46..47: mod_base = OTHER; note = uracil
  modified_base 49..50: mod_base = OTHER; note = uracil
  modified_base 52: mod_base = OTHER; note = uracil
  modified_base 56: mod_base = OTHER; note = uracil
  source 1..59: mol_type = other DNA
tgacaaggcgtagtcacggtnnnactnnntgatttttgtgaacagttcttctggatcag

SEQ ID NO: 1464 - DNA, 64 bp, synthetic construct
  misc_feature 1..64: note = Synthetic Primer
  misc_difference 21..23: note = n is a, c, g, t or u
  misc_difference 27..29: note = n is a, c, g, t or u
  modified_base 20: mod_base = OTHER; note = uracil
  modified_base 33: mod_base = OTHER; note = uracil
  modified_base 37..38: mod_base = OTHER; note = uracil
  modified_base 41: mod_base = OTHER; note = uracil
  modified_base 48: mod_base = OTHER; note = uracil
  modified_base 50..51: mod_base = OTHER; note = uracil
  modified_base 54: mod_base = OTHER; note = uracil
  modified_base 56: mod_base = OTHER; note = uracil
  modified_base 58: mod_base = OTHER; note = uracil
  modified_base 60..63: mod_base = OTHER; note = uracil
  source 1..64: mol_type = other DNA
tgacaaggcgtagtcacggtnnnactnnntgataccttgctaagagatattcatctgtcttttc

SEQ ID NO: 1465 - DNA, 58 bp, synthetic construct
  misc_feature 1..58: note = Synthetic Primer
  misc_difference 21..23: note = n is a, c, g, t or u
  misc_difference 27..29: note = n is a, c, g, t or u
  modified_base 20: mod_base = OTHER; note = uracil
  modified_base 33..34: mod_base = OTHER; note = uracil
  modified_base 38: mod_base = OTHER; note = uracil
  modified_base 41: mod_base = OTHER; note = uracil
  modified_base 44: mod_base = OTHER; note = uracil
  modified_base 50: mod_base = OTHER; note = uracil
  modified_base 52: mod_base = OTHER; note = uracil
  modified_base 57: mod_base = OTHER; note = uracil
  source 1..58: mol_type = other DNA
tgacaaggcgtagtcacggtnnnactnnntgattccatactgctcaacctctgcaata

SEQ ID NO: 1466 - DNA, 53 bp, synthetic construct
  misc_feature 1..53: note = Synthetic Primer
  misc_difference 21..23: note = n is a, c, g, t or u
  misc_difference 27..29: note = n is a, c, g, t or u
  modified_base 20: mod_base = OTHER; note = uracil
  modified_base 33: mod_base = OTHER; note = uracil
  modified_base 36: mod_base = OTHER; note = uracil
  modified_base 44..45: mod_base = OTHER; note = uracil
  modified_base 47: mod_base = OTHER; note = uracil
  source 1..53: mol_type = other DNA
tgacaaggcgtagtcacggtnnnactnnntgatcctggacagcttgtgggaag

SEQ ID NO: 1467 - DNA, 53 bp, synthetic construct
  misc_feature 1..53: note = Synthetic Primer
  misc_difference 21..23: note = n is a, c, g, t or u
  misc_difference 27..29: note = n is a, c, g, t or u
  modified_base 20: mod_base = OTHER; note = uracil
  modified_base 33..34: mod_base = OTHER; note = uracil
  modified_base 36: mod_base = OTHER; note = uracil
  modified_base 41: mod_base = OTHER; note = uracil
  modified_base 49: mod_base = OTHER; note = uracil
  source 1..53: mol_type = other DNA
tgacaaggcgtagtcacggtnnnactnnntgattctcagctgaggagatgggt

SEQ ID NO: 1468 - DNA, 52 bp, synthetic construct
  misc_feature 1..52: note = Synthetic Primer
  misc_difference 21..23: note = n is a, c, g, t or u
  misc_difference 27..29: note = n is a, c, g, t or u
  modified_base 20: mod_base = OTHER; note = uracil
  modified_base 33: mod_base = OTHER; note = uracil
  modified_base 42: mod_base = OTHER; note = uracil
  modified_base 49..51: mod_base = OTHER; note = uracil
  source 1..52: mol_type = other DNA
tgacaaggcgtagtcacggtnnnactnnntgatagaggccctgcacagtttt

SEQ ID NO: 1469 - DNA, 58 bp, synthetic construct
  misc_feature 1..58: note = Synthetic Primer
  misc_difference 21..23: note = n is a, c, g, t or u
  misc_difference 27..29: note = n is a, c, g, t or u
  modified_base 20: mod_base = OTHER; note = uracil
  modified_base 33: mod_base = OTHER; note = uracil
  modified_base 36..37: mod_base = OTHER; note = uracil
  modified_base 39: mod_base = OTHER; note = uracil
  modified_base 42: mod_base = OTHER; note = uracil
  modified_base 45..47: mod_base = OTHER; note = uracil
  modified_base 53: mod_base = OTHER; note = uracil
  modified_base 57: mod_base = OTHER; note = uracil
  source 1..58: mol_type = other DNA
tgacaaggcgtagtcacggtnnnactnnntgatccttctagtaatttgggaatgcctg

SEQ ID NO: 1470 - DNA, 52 bp, synthetic construct
  misc_feature 1..52: note = Synthetic Primer
  misc_difference 21..23: note = n is a, c, g, t or u
  misc_difference 27..29: note = n is a, c, g, t or u
  modified_base 20: mod_base = OTHER; note = uracil
  modified_base 33..34: mod_base = OTHER; note = uracil
  modified_base 37: mod_base = OTHER; note = uracil
  modified_base 42: mod_base = OTHER; note = uracil
  modified_base 48..49: mod_base = OTHER; note = uracil
  modified_base 51: mod_base = OTHER; note = uracil
  source 1..52: mol_type = other DNA
tgacaaggcgtagtcacggtnnnactnnntgattcctcagctcccggttctc

SEQ ID NO: 1471 - DNA, 58 bp, synthetic construct
  misc_feature 1..58: note = Synthetic Primer
  misc_difference 21..23: note = n is a, c, g, t or u
  misc_difference 27..29: note = n is a, c, g, t or u
  modified_base 20: mod_base = OTHER; note = uracil
  modified_base 33..34: mod_base = OTHER; note = uracil
  modified_base 45: mod_base = OTHER; note = uracil
  modified_base 47..49: mod_base = OTHER; note = uracil
  modified_base 52: mod_base = OTHER; note = uracil
  source 1..58: mol_type = other DNA
tgacaaggcgtagtcacggtnnnactnnntgattgacaccaacatctttactgcagaa

SEQ ID NO: 1472 - DNA, 54 bp, synthetic construct
  misc_feature 1..54: note = Synthetic Primer
  misc_difference 21..23: note = n is a, c, g, t or u
  misc_difference 27..29: note = n is a, c, g, t or u
  modified_base 20: mod_base = OTHER; note = uracil
  modified_base 33: mod_base = OTHER; note = uracil
  modified_base 41: mod_base = OTHER; note = uracil
  modified_base 46: mod_base = OTHER; note = uracil
  modified_base 51: mod_base = OTHER; note = uracil
  source 1..54: mol_type = other DNA
tgacaaggcgtagtcacggtnnnactnnntgatgaagacatgagctcgagtgct

SEQ ID NO: 1473 - DNA, 53 bp, synthetic construct
  misc_feature 1..53: note = Synthetic Primer
  misc_difference 21..23: note = n is a, c, g, t or u
  misc_difference 27..29: note = n is a, c, g, t or u
  modified_base 20: mod_base = OTHER; note = uracil
  modified_base 33: mod_base = OTHER; note = uracil
  modified_base 46: mod_base = OTHER; note = uracil
  modified_base 51..52: mod_base = OTHER; note = uracil
  source 1..53: mol_type = other DNA
tgacaaggcgtagtcacggtnnnactnnntgataccaggaaggactccacttc

SEQ ID NO: 1474 - DNA, 59 bp, synthetic construct
  misc_feature 1..59: note = Synthetic Primer
  misc_difference 21..23: note = n is a, c, g, t or u
  misc_difference 27..29: note = n is a, c, g, t or u
  modified_base 20: mod_base = OTHER; note = uracil
  modified_base 33: mod_base = OTHER; note = uracil
  modified_base 37: mod_base = OTHER; note = uracil
  modified_base 46..47: mod_base = OTHER; note = uracil
  modified_base 49: mod_base = OTHER; note = uracil
  modified_base 52: mod_base = OTHER; note = uracil
  modified_base 58: mod_base = OTHER; note = uracil
  source 1..59: mol_type = other DNA
tgacaaggcgtagtcacggtnnnactnnntgatcactgacggaagttctcataaacgtc

SEQ ID NO: 1475 - DNA, 57 bp, synthetic construct
  misc_feature 1..57: note = Synthetic Primer
  misc_difference 21..23: note = n is a, c, g, t or u
  misc_difference 27..29: note = n is a, c, g, t or u
  modified_base 20: mod_base = OTHER; note = uracil
  modified_base 33: mod_base = OTHER; note = uracil
  modified_base 36: mod_base = OTHER; note = uracil
  modified_base 38: mod_base = OTHER; note = uracil
  modified_base 44: mod_base = OTHER; note = uracil
  modified_base 47: mod_base = OTHER; note = uracil
  modified_base 51: mod_base = OTHER; note = uracil
  modified_base 56: mod_base = OTHER; note = uracil
  source 1..57: mol_type = other DNA
tgacaaggcgtagtcacggtnnnactnnntgataatctcccaatcatcactcgagtc

SEQ ID NO: 1476 - DNA, 60 bp, synthetic construct
  misc_feature 1..60: note = Synthetic Primer
  misc_difference 21..23: note = n is a, c, g, t or u
  misc_difference 27..29: note = n is a, c, g, t or u
  modified_base 20: mod_base = OTHER; note = uracil
  modified_base 33..35: mod_base = OTHER; note = uracil
  modified_base 37: mod_base = OTHER; note = uracil
  modified_base 40..41: mod_base = OTHER; note = uracil
  modified_base 48..50: mod_base = OTHER; note = uracil
  modified_base 53: mod_base = OTHER; note = uracil
  modified_base 55..57: mod_base = OTHER; note = uracil
  source 1..60: mol_type = other DNA
tgacaaggcgtagtcacggtnnnactnnntgatttctggttgagagatttggtatttggt

SEQ ID NO: 1477 - DNA, 57 bp, synthetic construct
  misc_feature 1..57: note = Synthetic Primer
  misc_difference 21..23: note = n is a, c, g, t or u
  misc_difference 27..29: note = n is a, c, g, t or u
  modified_base 20: mod_base = OTHER; note = uracil
  modified_base 33: mod_base = OTHER; note = uracil
  modified_base 36: mod_base = OTHER; note = uracil
  modified_base 38: mod_base = OTHER; note = uracil
  modified_base 41: mod_base = OTHER; note = uracil
  modified_base 50: mod_base = OTHER; note = uracil
  modified_base 53: mod_base = OTHER; note = uracil
  modified_base 55: mod_base = OTHER; note = uracil
  source 1..57: mol_type = other DNA
tgacaaggcgtagtcacggtnnnactnnntgataatatgctcagaccagtcatctgc

SEQ ID NO: 1478 - DNA, 63 bp, synthetic construct
  misc_feature 1..63: note = Synthetic Primer
  misc_difference 21..23: note = n is a, c, g, t or u
  misc_difference 27..29: note = n is a, c, g, t or u
  modified_base 20: mod_base = OTHER; note = uracil
  modified_base 33: mod_base = OTHER; note = uracil
  modified_base 37: mod_base = OTHER; note = uracil
  modified_base 40..43: mod_base = OTHER; note = uracil
  modified_base 47: mod_base = OTHER; note = uracil
  modified_base 49: mod_base = OTHER; note = uracil
  modified_base 51: mod_base = OTHER; note = uracil
  modified_base 54..55: mod_base = OTHER; note = uracil
  modified_base 57: mod_base = OTHER; note = uracil
  source 1..63: mol_type = other DNA
tgacaaggcgtagtcacggtnnnactnnntgatcaatgcttttaaatatgtcattgtgggcat

SEQ ID NO: 1479 - DNA, 50 bp, synthetic construct
  misc_feature 1..50: note = Synthetic Primer
  misc_difference 21..23: note = n is a, c, g, t or u
  misc_difference 27..29: note = n is a, c, g, t or u
  modified_base 20: mod_base = OTHER; note = uracil
  modified_base 33: mod_base = OTHER; note = uracil
  modified_base 39: mod_base = OTHER; note = uracil
  modified_base 44: mod_base = OTHER; note = uracil
  source 1..50: mol_type = other DNA
tgacaaggcgtagtcacggtnnnactnnntgatcaacatggcctggcagc

SEQ ID NO: 1480 - DNA, 50 bp, synthetic construct
  misc_feature 1..50: note = Synthetic Primer
  misc_difference 21..23: note = n is a, c, g, t or u
  misc_difference 27..29: note = n is a, c, g, t or u
  modified_base 20: mod_base = OTHER; note = uracil
  modified_base 33: mod_base = OTHER; note = uracil
  modified_base 35: mod_base = OTHER; note = uracil
  modified_base 38: mod_base = OTHER; note = uracil
  modified_base 40: mod_base = OTHER; note = uracil
  source 1..50: mol_type = other DNA
tgacaaggcgtagtcacggtnnnactnnntgatatcctctgccccaccct

SEQ ID NO: 1481 - DNA, 53 bp, synthetic construct
  misc_feature 1..53: note = Synthetic Primer
  misc_difference 21..23: note = n is a, c, g, t or u
  misc_difference 27..29: note = n is a, c, g, t or u
  modified_base 20: mod_base = OTHER; note = uracil
  modified_base 33..35: mod_base = OTHER; note = uracil
  modified_base 37..38: mod_base = OTHER; note = uracil
  source 1..53: mol_type = other DNA
tgacaaggcgtagtcacggtnnnactnnntgatttgttgagcacaaggagcag

SEQ ID NO: 1482 - DNA, 61 bp, synthetic construct
  misc_feature 1..61: note = Synthetic Primer
  misc_difference 21..23: note = n is a, c, g, t or u
  misc_difference 27..29: note = n is a, c, g, t or u
  modified_base 20: mod_base = OTHER; note = uracil
  modified_base 33: mod_base = OTHER; note = uracil
  modified_base 36: mod_base = OTHER; note = uracil
  modified_base 38..39: mod_base = OTHER; note = uracil
  modified_base 43: mod_base = OTHER; note = uracil
  modified_base 47..49: mod_base = OTHER; note = uracil
  modified_base 52: mod_base = OTHER; note = uracil
  modified_base 54: mod_base = OTHER; note = uracil
  modified_base 56..57: mod_base = OTHER; note = uracil
  source 1..61: mol_type = other DNA
tgacaaggcgtagtcacggtnnnactnnntgatgatcttcaatggctttagtctgttccaa

SEQ ID NO: 1483 - DNA, 54 bp, synthetic construct
  misc_feature 1..54: note = Synthetic Primer
  misc_difference 21..23: note = n is a, c, g, t or u
  misc_difference 27..29: note = n is a, c, g, t or u
  modified_base 20: mod_base = OTHER; note = uracil
  modified_base 33: mod_base = OTHER; note = uracil
  modified_base 39..40: mod_base = OTHER; note = uracil
  modified_base 46: mod_base = OTHER; note = uracil
  source 1..54: mol_type = other DNA
tgacaaggcgtagtcacggtnnnactnnntgatcaccgttccacctgaaagact

SEQ ID NO: 1484 - DNA, 51 bp, synthetic construct
  misc_feature 1..51: note = Synthetic Primer
  misc_difference 21..23: note = n is a, c, g, t or u
  misc_difference 27..29: note = n is a, c, g, t or u
  modified_base 20: mod_base = OTHER; note = uracil
  modified_base 33: mod_base = OTHER; note = uracil
  modified_base 35: mod_base = OTHER; note = uracil
  modified_base 45: mod_base = OTHER; note = uracil
  source 1..51: mol_type = other DNA
tgacaaggcgtagtcacggtnnnactnnntgatatcagcgagagtggcagg

SEQ ID NO: 1485 - DNA, 53 bp, synthetic construct
  misc_feature 1..53: note = Synthetic Primer
  misc_difference 21..23: note = n is a, c, g, t or u
  misc_difference 27..29: note = n is a, c, g, t or u
  modified_base 20: mod_base = OTHER; note = uracil
  modified_base 33: mod_base = OTHER; note = uracil
  modified_base 38: mod_base = OTHER; note = uracil
  modified_base 43: mod_base = OTHER; note = uracil
  modified_base 46: mod_base = OTHER; note = uracil
  modified_base 50: mod_base = OTHER; note = uracil
  source 1..53: mol_type = other DNA
tgacaaggcgtagtcacggtnnnactnnntgataccatgccatagtccatgcc

SEQ ID NO: 1486 - DNA, 51 bp, synthetic construct
  misc_feature 1..51: note = Synthetic Primer
  misc_difference 21..23: note = n is a, c, g, t or u
  misc_difference 27..29: note = n is a, c, g, t or u
  modified_base 20: mod_base = OTHER; note = uracil
  modified_base 33..34: mod_base = OTHER; note = uracil
  modified_base 36: mod_base = OTHER; note = uracil
  modified_base 46: mod_base = OTHER; note = uracil
  source 1..51: mol_type = other DNA
tgacaaggcgtagtcacggtnnnactnnntgattctgcagaggactccagc

SEQ ID NO: 1487 - DNA, 55 bp, synthetic construct
  misc_feature 1..55: note = Synthetic Primer
  misc_difference 21..23: note = n is a, c, g, t or u
  misc_difference 27..29: note = n is a, c, g, t or u
  modified_base 20: mod_base = OTHER; note = uracil
  modified_base 33: mod_base = OTHER; note = uracil
  modified_base 37: mod_base = OTHER; note = uracil
  modified_base 40: mod_base = OTHER; note = uracil
  modified_base 42: mod_base = OTHER; note = uracil
  modified_base 44..45: mod_base = OTHER; note = uracil
  modified_base 47: mod_base = OTHER; note = uracil
  modified_base 54: mod_base = OTHER; note = uracil
  source 1..55: mol_type = other DNA
tgacaaggcgtagtcacggtnnnactnnntgatgggtgctgtattctgcaggatc

SEQ ID NO: 1488 - DNA, 58 bp, synthetic construct
  misc_feature 1..58: note = Synthetic Primer
  misc_difference 21..23: note = n is a, c, g, t or u
  misc_difference 27..29: note = n is a, c, g, t or u
  modified_base 20: mod_base = OTHER; note = uracil
  modified_base 33: mod_base = OTHER; note = uracil
  modified_base 41: mod_base = OTHER; note = uracil
  modified_base 43: mod_base = OTHER; note = uracil
  modified_base 48: mod_base = OTHER; note = uracil
  modified_base 50..51: mod_base = OTHER; note = uracil
  modified_base 53: mod_base = OTHER; note = uracil
  source 1..58: mol_type = other DNA
tgacaaggcgtagtcacggtnnnactnnntgatcaagacctctcaggtattgtaaggg

SEQ ID NO: 1489 - DNA, 55 bp, synthetic construct
  misc_feature 1..55: note = Synthetic Primer
  misc_difference 21..23: note = n is a, c, g, t or u
  misc_difference 27..29: note = n is a, c, g, t or u
  modified_base 20: mod_base = OTHER; note = uracil
  modified_base 33..34: mod_base = OTHER; note = uracil
  modified_base 40: mod_base = OTHER; note = uracil
  modified_base 44..45: mod_base = OTHER; note = uracil
  modified_base 48..50: mod_base = OTHER; note = uracil
  modified_base 52: mod_base = OTHER; note = uracil
  source 1..55: mol_type = other DNA
tgacaaggcgtagtcacggtnnnactnnntgattgaagatgacttcctttctcgc

SEQ ID NO: 1490 - DNA, 50 bp, synthetic construct
  misc_feature 1..50: note = Synthetic Primer
  misc_difference 21..23: note = n is a, c, g, t or u
  misc_difference 27..29: note = n is a, c, g, t or u
  modified_base 20: mod_base = OTHER; note = uracil
  modified_base 33: mod_base = OTHER; note = uracil
  modified_base 36: mod_base = OTHER; note = uracil
  modified_base 48: mod_base = OTHER; note = uracil
  source 1..50: mol_type = other DNA
tgacaaggcgtagtcacggtnnnactnnntgatcatcccccaggaggtcg

SEQ ID NO: 1491 - DNA, 53 bp, synthetic construct
  misc_feature 1..53: note = Synthetic Primer
  misc_difference 21..23: note = n is a, c, g, t or u
  misc_difference 27..29: note = n is a, c, g, t or u
  modified_base 20: mod_base = OTHER; note = uracil
  modified_base 33: mod_base = OTHER; note = uracil
  modified_base 36: mod_base = OTHER; note = uracil
  modified_base 41..42: mod_base = OTHER; note = uracil
  modified_base 44: mod_base = OTHER; note = uracil
  modified_base 47: mod_base = OTHER; note = uracil
  source 1..53: mol_type = other DNA
tgacaaggcgtagtcacggtnnnactnnntgatgctcagcttgtactcagggc

SEQ ID NO: 1492 - DNA, 59 bp, synthetic construct
  misc_feature 1..59: note = Synthetic Primer
  misc_difference 21..23: note = n is a, c, g, t or u
  misc_difference 27..29: note = n is a, c, g, t or u
  modified_base 20: mod_base = OTHER; note = uracil
  modified_base 33: mod_base = OTHER; note = uracil
  modified_base 36..38: mod_base = OTHER; note = uracil
  modified_base 45..46: mod_base = OTHER; note = uracil
  modified_base 49..52: mod_base = OTHER; note = uracil
  modified_base 54..56: mod_base = OTHER; note = uracil
  source 1..59: mol_type = other DNA
tgacaaggcgtagtcacggtnnnactnnntgatcctttcacgaattcattttctttgcg

SEQ ID NO: 1493 - DNA, 54 bp, synthetic construct
  misc_feature 1..54: note = Synthetic Primer
  misc_difference 21..23: note = n is a, c, g, t or u
  misc_difference 27..29: note = n is a, c, g, t or u
  modified_base 20: mod_base = OTHER; note = uracil
  modified_base 33: mod_base = OTHER; note = uracil
  modified_base 39..40: mod_base = OTHER; note = uracil
  modified_base 43: mod_base = OTHER; note = uracil
  modified_base 48..49: mod_base = OTHER; note = uracil
  modified_base 51: mod_base = OTHER; note = uracil
  source 1..54: mol_type = other DNA
tgacaaggcgtagtcacggtnnnactnnntgatggagcttgctcagcttgtact

SEQ ID NO: 1494 - DNA, 62 bp, synthetic construct
  misc_feature 1..62: note = Synthetic Primer
  misc_difference 21..23: note = n is a, c, g, t or u
  misc_difference 27..29: note = n is a, c, g, t or u
  modified_base 20: mod_base = OTHER; note = uracil
  modified_base 33: mod_base = OTHER; note = uracil
  modified_base 35: mod_base = OTHER; note = uracil
  modified_base 38..40: mod_base = OTHER; note = uracil
  modified_base 42: mod_base = OTHER; note = uracil
  modified_base 44: mod_base = OTHER; note = uracil
  modified_base 49..50: mod_base = OTHER; note = uracil
  modified_base 54: mod_base = OTHER; note = uracil
  modified_base 58: mod_base = OTHER; note = uracil
  modified_base 61: mod_base = OTHER; note = uracil
  source 1..62: mol_type = other DNA
tgacaaggcgtagtcacggtnnnactnnntgatctggtttctgtagaattccatgagtagtt

SEQ ID NO: 1495 - DNA, 54 bp, synthetic construct
  misc_feature 1..54: note = Synthetic Primer
  misc_difference 21..23: note = n is a, c, g, t or u
  misc_difference 27..29: note = n is a, c, g, t or u
  modified_base 20: mod_base = OTHER; note = uracil
  modified_base 33..34: mod_base = OTHER; note = uracil
  modified_base 36: mod_base = OTHER; note = uracil
  modified_base 41: mod_base = OTHER; note = uracil
  source 1..54: mol_type = other DNA
tgacaaggcgtagtcacggtnnnactnnntgattctccactagcaccaaggaca

SEQ ID NO: 1496 - DNA, 53 bp, synthetic construct
  misc_feature 1..53: note = Synthetic Primer
  misc_difference 21..23: note = n is a, c, g, t or u
  misc_difference 27..29: note = n is a, c, g, t or u
  modified_base 20: mod_base = OTHER; note = uracil
  modified_base 33: mod_base = OTHER; note = uracil
  modified_base 36: mod_base = OTHER; note = uracil
  modified_base 39..40: mod_base = OTHER; note = uracil
  modified_base 44..45: mod_base = OTHER; note = uracil
  modified_base 51: mod_base = OTHER; note = uracil
  source 1..53: mol_type = other DNA
tgacaaggcgtagtcacggtnnnactnnntgatgctccttcagttgaggctgg

SEQ ID NO: 1497 - DNA, 50 bp, synthetic construct
  misc_feature 1..50: note = Synthetic Primer
  misc_difference 21..23: note = n is a, c, g, t or u
  misc_difference 27..29: note = n is a, c, g, t or u
  modified_base 20: mod_base = OTHER; note = uracil
  modified_base 33: mod_base = OTHER; note = uracil
  modified_base 42: mod_base = OTHER; note = uracil
  modified_base 48: mod_base = OTHER; note = uracil
  source 1..50: mol_type = other DNA
tgacaaggcgtagtcacggtnnnactnnntgatcccccacctgagactcc

SEQ ID NO: 1498 - DNA, 62 bp, synthetic construct
  misc_feature 1..62: note = Synthetic Primer
  misc_difference 21..23: note = n is a, c, g, t or u
  misc_difference 27..29: note = n is a, c, g, t or u
  modified_base 20: mod_base = OTHER; note = uracil
  modified_base 33: mod_base = OTHER; note = uracil
  modified_base 38: mod_base = OTHER; note = uracil
  modified_base 44: mod_base = OTHER; note = uracil
  modified_base 47: mod_base = OTHER; note = uracil
  modified_base 49: mod_base = OTHER; note = uracil
  modified_base 59: mod_base = OTHER; note = uracil
  source 1..62: mol_type = other DNA
tgacaaggcgtagtcacggtnnnactnnntgataaaatccaaatcatataccaaagcatcca

SEQ ID NO: 1499 - DNA, 65 bp, synthetic construct
  misc_feature 1..65: note = Synthetic Primer
  misc_difference 21..23: note = n is a, c, g, t or u
  misc_difference 27..29: note = n is a, c, g, t or u
  modified_base 20: mod_base = OTHER; note = uracil
  modified_base 33..34: mod_base = OTHER; note = uracil
  modified_base 37: mod_base = OTHER; note = uracil
  modified_base 41: mod_base = OTHER; note = uracil
  modified_base 43: mod_base = OTHER; note = uracil
  modified_base 49..50: mod_base = OTHER; note = uracil
  modified_base 52..54: mod_base = OTHER; note = uracil
  modified_base 56: mod_base = OTHER; note = uracil
  modified_base 59: mod_base = OTHER; note = uracil
  modified_base 61: mod_base = OTHER; note = uracil
  source 1..65: mol_type = other DNA
tgacaaggcgtagtcacggtnnnactnnntgattagtaagtatgaaacttgtttctggtatccaa

SEQ ID NO: 1500 - DNA, 58 bp, synthetic construct
  misc_feature 1..58: note = Synthetic Primer
  misc_difference 21..23: note = n is a, c, g, t or u
  misc_difference 27..29: note = n is a, c, g, t or u
  modified_base 20: mod_base = OTHER; note = uracil
  modified_base 33: mod_base = OTHER; note = uracil
  modified_base 36: mod_base = OTHER; note = uracil
  modified_base 39: mod_base = OTHER; note = uracil
  modified_base 41: mod_base = OTHER; note = uracil
  modified_base 44: mod_base = OTHER; note = uracil
  modified_base 46: mod_base = OTHER; note = uracil
  modified_base 51: mod_base = OTHER; note = uracil
  modified_base 53: mod_base = OTHER; note = uracil
  modified_base 56..57: mod_base = OTHER; note = uracil
  source 1..58: mol_type = other DNA
tgacaaggcgtagtcacggtnnnactnnntgatgatcgtctcctctgaaatgtcattc

SEQ ID NO: 1501 - DNA, 58 bp, synthetic construct
  misc_feature 1..58: note = Synthetic Primer
  misc_difference 21..23: note = n is a, c, g, t or u
  misc_difference 27..29: note = n is a, c, g, t or u
  modified_base 20: mod_base = OTHER; note = uracil
  modified_base 33: mod_base = OTHER; note = uracil
  modified_base 38: mod_base = OTHER; note = uracil
  modified_base 40: mod_base = OTHER; note = uracil
  modified_base 42: mod_base = OTHER; note = uracil
  modified_base 44: mod_base = OTHER; note = uracil
  modified_base 47: mod_base = OTHER; note = uracil
  source 1..58: mol_type = other DNA
tgacaaggcgtagtcacggtnnnactnnntgataagatctatgtcataaaagcagggc

SEQ ID NO: 1502 - DNA, 57 bp, synthetic construct
  misc_feature 1..57: note = Synthetic Primer
  misc_difference 21..23: note = n is a, c, g, t or u
  misc_difference 27..29: note = n is a, c, g, t or u
  modified_base 20: mod_base = OTHER; note = uracil
  modified_base 33: mod_base = OTHER; note = uracil
  modified_base 39: mod_base = OTHER; note = uracil
  modified_base 43: mod_base = OTHER; note = uracil
  modified_base 46: mod_base = OTHER; note = uracil
  modified_base 49: mod_base = OTHER; note = uracil
  modified_base 56: mod_base = OTHER; note = uracil
  source 1..57: mol_type = other DNA
tgacaaggcgtagtcacggtnnnactnnntgatggacatcagtggtactgagcaata

SEQ ID NO: 1503 - DNA, 50 bp, synthetic construct
  misc_feature 1..50: note = Synthetic Primer
  misc_difference 21..23: note = n is a, c, g, t or u
  misc_difference 27..29: note = n is a, c, g, t or u
  modified_base 20: mod_base = OTHER; note = uracil
  modified_base 33: mod_base = OTHER; note = uracil
  modified_base 35: mod_base = OTHER; note = uracil
  modified_base 37: mod_base = OTHER; note = uracil
  modified_base 40: mod_base = OTHER; note = uracil
  modified_base 45: mod_base = OTHER; note = uracil
  source 1..50: mol_type = other DNA
tgacaaggcgtagtcacggtnnnactnnntgatgtgtcctccgctgaggc

SEQ ID NO: 1504 - DNA, 54 bp, synthetic construct
  misc_feature 1..54: note = Synthetic Primer
  misc_difference 21..23: note = n is a, c, g, t or u
  misc_difference 27..29: note = n is a, c, g, t or u
  modified_base 20: mod_base = OTHER; note = uracil
  modified_base 33: mod_base = OTHER; note = uracil
  modified_base 35: mod_base = OTHER; note = uracil
  modified_base 39: mod_base = OTHER; note = uracil
  modified_base 42: mod_base = OTHER; note = uracil
  modified_base 45: mod_base = OTHER; note = uracil
  modified_base 52: mod_base = OTHER; note = uracil
  source 1..54: mol_type = other DNA
tgacaaggcgtagtcacggtnnnactnnntgatctgagtcctcctcaccactga

SEQ ID NO: 1505 - DNA, 52 bp, synthetic construct
  misc_feature 1..52: note = Synthetic Primer
  misc_difference 21..23: note = n is a, c, g, t or u
  misc_difference 27..29: note = n is a, c, g, t or u
  modified_base 20: mod_base = OTHER; note = uracil
  modified_base 33: mod_base = OTHER; note = uracil
  modified_base 48: mod_base = OTHER; note = uracil
  modified_base 50: mod_base = OTHER; note = uracil
  source 1..52: mol_type = other DNA
tgacaaggcgtagtcacggtnnnactnnntgatcaccagacacagcatctgc

SEQ ID NO: 1506 - DNA, 56 bp, synthetic construct
  misc_feature 1..56: note = Synthetic Primer
  misc_difference 21..23: note = n is a, c, g, t or u
  misc_difference 27..29: note = n is a, c, g, t or u
  modified_base 20: mod_base = OTHER; note = uracil
  modified_base 33: mod_base = OTHER; note = uracil
  modified_base 36: mod_base = OTHER; note = uracil
  modified_base 43: mod_base = OTHER; note = uracil
  modified_base 45: mod_base = OTHER; note = uracil
  modified_base 47..48: mod_base = OTHER; note = uracil
  modified_base 54..55: mod_base = OTHER; note = uracil
  source 1..56: mol_type = other DNA
tgacaaggcgtagtcacggtnnnactnnntgatcatcaggagtctgttggaccttg

SEQ ID NO: 1507 - DNA, 56 bp, synthetic construct
  misc_feature 1..56: note = Synthetic Primer
  misc_difference 21..23: note = n is a, c, g, t or u
  misc_difference 27..29: note = n is a, c, g, t or u
  modified_base 20: mod_base = OTHER; note = uracil
  modified_base 33: mod_base = OTHER; note = uracil
  modified_base 35: mod_base = OTHER; note = uracil
  modified_base 38: mod_base = OTHER; note = uracil
  modified_base 41: mod_base = OTHER; note = uracil
  modified_base 44..45: mod_base = OTHER; note = uracil
  modified_base 47: mod_base = OTHER; note = uracil
  modified_base 53..54: mod_base = OTHER; note = uracil
  source 1..56: mol_type = other DNA
tgacaaggcgtagtcacggtnnnactnnntgatgtagtagtggttgtggcacttgg

SEQ ID NO: 1508 - DNA, 56 bp, synthetic construct
  misc_feature 1..56: note = Synthetic Primer
  misc_difference 21..23: note = n is a, c, g, t or u
  misc_difference 27..29: note = n is a, c, g, t or u
  modified_base 20: mod_base = OTHER; note = uracil
  modified_base 33: mod_base = OTHER; note = uracil
  modified_base 36: mod_base = OTHER; note = uracil
  modified_base 38..40: mod_base = OTHER; note = uracil
  modified_base 45: mod_base = OTHER; note = uracil
  modified_base 47..48: mod_base = OTHER; note = uracil
  modified_base 50: mod_base = OTHER; note = uracil
  modified_base 55: mod_base = OTHER; note = uracil
  source 1..56: mol_type = other DNA
tgacaaggcgtagtcacggtnnnactnnntgatcctctttgaggtcttgtccagtc

SEQ ID NO: 1509 - DNA, 62 bp, synthetic construct
  misc_feature 1..62: note = Synthetic Primer
  misc_difference 21..23: note = n is a, c, g, t or u
  misc_difference 27..29: note = n is a, c, g, t or u
  modified_base 20: mod_base = OTHER; note = uracil
  modified_base 33: mod_base = OTHER; note = uracil
  modified_base 36..39: mod_base = OTHER; note = uracil
  modified_base 45..46: mod_base = OTHER; note = uracil
  modified_base 51..53: mod_base = OTHER; note = uracil
  modified_base 57: mod_base = OTHER; note = uracil
  modified_base 60..61: mod_base = OTHER; note = uracil
  source 1..62: mol_type = other DNA
tgacaaggcgtagtcacggtnnnactnnntgatacttttaacacttcacctttaactgcttc

SEQ ID NO: 1510 - DNA, 54 bp, synthetic construct
  misc_feature 1..54: note = Synthetic Primer
  misc_difference 21..23: note = n is a, c, g, t or u
  misc_difference 27..29: note = n is a, c, g, t or u
  modified_base 20: mod_base = OTHER; note = uracil
  modified_base 33: mod_base = OTHER; note = uracil
  modified_base 35: mod_base = OTHER; note = uracil
  modified_base 38..39: mod_base = OTHER; note = uracil
  modified_base 42: mod_base = OTHER; note = uracil
  modified_base 46: mod_base = OTHER; note = uracil
  modified_base 48: mod_base = OTHER; note = uracil
  modified_base 50..51: mod_base = OTHER; note = uracil
  modified_base 53: mod_base = OTHER; note = uracil
  source 1..54: mol_type = other DNA
tgacaaggcgtagtcacggtnnnactnnntgatgtggttcgtggctctcttatc

SEQ ID NO: 1511 - DNA, 59 bp, synthetic construct
  misc_feature 1..59: note = Synthetic Primer
  misc_difference 21..23: note = n is a, c, g, t or u
  misc_difference 27..29: note = n is a, c, g, t or u
  modified_base 20: mod_base = OTHER; note = uracil
  modified_base 33: mod_base = OTHER; note = uracil
  modified_base 39: mod_base = OTHER; note = uracil
  modified_base 44: mod_base = OTHER; note = uracil
  modified_base 46: mod_base = OTHER; note = uracil
  modified_base 53: mod_base = OTHER; note = uracil
  modified_base 55..56: mod_base = OTHER; note = uracil
  modified_base 58: mod_base = OTHER; note = uracil
  source 1..59: mol_type = other DNA
tgacaaggcgtagtcacggtnnnactnnntgatgagagtgcagtatcaagaatcttgtc

SEQ ID NO: 1512 - DNA, 50 bp, synthetic construct
  misc_feature 1..50: note = Synthetic Primer
  misc_difference 21..23: note = n is a, c, g, t or u
  misc_difference 27..29: note = n is a, c, g, t or u
  modified_base 20: mod_base = OTHER; note = uracil
  modified_base 33: mod_base = OTHER; note = uracil
  modified_base 37: mod_base = OTHER; note = uracil
  modified_base 44: mod_base = OTHER; note = uracil
  modified_base 46: mod_base = OTHER; note = uracil
  modified_base 48: mod_base = OTHER; note = uracil
  source 1..50: mol_type = other DNA
tgacaaggcgtagtcacggtnnnactnnntgatgggtaggccgtgtctgg

SEQ ID NO: 1513 - DNA, 54 bp, synthetic construct
  misc_feature 1..54: note = Synthetic Primer
  misc_difference 21..23: note = n is a, c, g, t or u
  misc_difference 27..29: note = n is a, c, g, t or u
  modified_base 20: mod_base = OTHER; note = uracil
  modified_base 33: mod_base = OTHER; note = uracil
  modified_base 37: mod_base = OTHER; note = uracil
  modified_base 53: mod_base = OTHER; note = uracil
  source 1..54: mol_type = other DNA
tgacaaggcgtagtcacggtnnnactnnntgataggtggcaccaaagctgtatt

SEQ ID NO: 1514 - DNA, 55 bp, synthetic construct
  misc_feature 1..55: note = Synthetic Primer
  misc_difference 21..23: note = n is a, c, g, t or u
  misc_difference 27..29: note = n is a, c, g, t or u
  modified_base 20: mod_base = OTHER; note = uracil
  modified_base 33: mod_base = OTHER; note = uracil
  modified_base 41: mod_base = OTHER; note = uracil
  modified_base 53: mod_base = OTHER; note = uracil
  source 1..55: mol_type = other DNA
tgacaaggcgtagtcacggtnnnactnnntgatgccgtcttcctccatctcatag

SEQ ID NO: 1515 - DNA, 52 bp, synthetic construct
  misc_feature 1..52: note = Synthetic Primer
  misc_difference 21..23: note = n is a, c, g, t or u
  misc_difference 27..29: note = n is a, c, g, t or u
  modified_base 20: mod_base = OTHER; note = uracil
  modified_base 33: mod_base = OTHER; note = uracil
  modified_base 38: mod_base = OTHER; note = uracil
  modified_base 47..49: mod_base = OTHER; note = uracil
  source 1..52: mol_type = other DNA
tgacaaggcgtagtcacggtnnnactnnntgatgaactcccgcaggtttccc

SEQ ID NO: 1516 - DNA, 63 bp, synthetic construct
  misc_feature 1..63: note = Synthetic Primer
  misc_difference 21..23: note = n is a, c, g, t or u
  misc_difference 27..29: note = n is a, c, g, t or u
  modified_base 20: mod_base = OTHER; note = uracil
  modified_base 33..35: mod_base = OTHER; note = uracil
  modified_base 38..39: mod_base = OTHER; note = uracil
  modified_base 41..43: mod_base = OTHER; note = uracil
  modified_base 47: mod_base = OTHER; note = uracil
  modified_base 50..51: mod_base = OTHER; note = uracil
  modified_base 54: mod_base = OTHER; note = uracil
  modified_base 57..59: mod_base = OTHER; note = uracil
  modified_base 61: mod_base = OTHER; note = uracil
  source 1..63: mol_type = other DNA
tgacaaggcgtagtcacggtnnnactnnntgatttgcttctttaaatagttcatgctttatgg

SEQ ID NO: 1517 - DNA, 53 bp, synthetic construct
  misc_feature 1..53: note = Synthetic Primer
  misc_difference 21..23: note = n is a, c, g, t or u
  misc_difference 27..29: note = n is a, c, g, t or u
  modified_base 20: mod_base = OTHER; note = uracil
  modified_base 33: mod_base = OTHER; note = uracil
  modified_base 37: mod_base = OTHER; note = uracil
  modified_base 41: mod_base = OTHER; note = uracil
  modified_base 48: mod_base = OTHER; note = uracil
  source 1..53: mol_type = other DNA
tgacaaggcgtagtcacggtnnnactnnntgataggtagctaacccctaccct

SEQ ID NO: 1518 - DNA, 60 bp, synthetic construct
  misc_feature 1..60: note = Synthetic Primer
  misc_difference 21..23: note = n is a, c, g, t or u
  misc_difference 27..29: note = n is a, c, g, t or u
  modified_base 20: mod_base = OTHER; note = uracil
  modified_base 33: mod_base = OTHER; note = uracil
  modified_base 50..51: mod_base = OTHER; note = uracil
  modified_base 57..58: mod_base = OTHER; note = uracil
  source 1..60: mol_type = other DNA
tgacaaggcgtagtcacggtnnnactnnntgatggaagagaaaaggagattacagcttcc

SEQ ID NO: 1519 - DNA, 61 bp, synthetic construct
  misc_feature 1..61: note = Synthetic Primer
  misc_difference 21..23: note = n is a, c, g, t or u
  misc_difference 27..29: note = n is a, c, g, t or u
  modified_base 20: mod_base = OTHER; note = uracil
  modified_base 33: mod_base = OTHER; note = uracil
  modified_base 36..37: mod_base = OTHER; note = uracil
  modified_base 39..42: mod_base = OTHER; note = uracil
  modified_base 44..45: mod_base = OTHER; note = uracil
  modified_base 47: mod_base = OTHER; note = uracil
  modified_base 53: mod_base = OTHER; note = uracil
  source 1..61: mol_type = other DNA
tgacaaggcgtagtcacggtnnnactnnntgatcattgttttcttatacccatcagaagct

SEQ ID NO: 1520 - DNA, 53 bp, synthetic construct
  misc_feature 1..53: note = Synthetic Primer
  misc_difference 21..23: note = n is a, c, g, t or u
  misc_difference 27..29: note = n is a, c, g, t or u
  modified_base 20: mod_base = OTHER; note = uracil
  modified_base 33: mod_base = OTHER; note = uracil
  modified_base 46: mod_base = OTHER; note = uracil
  modified_base 50: mod_base = OTHER; note = uracil
  source 1..53: mol_type = other DNA
tgacaaggcgtagtcacggtnnnactnnntgatacagcaccaacctggatgag

SEQ ID NO: 1521 - DNA, 52 bp, synthetic construct
  misc_feature 1..52: note = Synthetic Primer
  misc_difference 21..23: note = n is a, c, g, t or u
  misc_difference 27..29: note = n is a, c, g, t or u
  modified_base 20: mod_base = OTHER; note = uracil
  modified_base 33..35: mod_base = OTHER; note = uracil
  modified_base 40: mod_base = OTHER; note = uracil
  modified_base 50..51: mod_base = OTHER; note = uracil
  source 1..52: mol_type = other DNA
tgacaaggcgtagtcacggtnnnactnnntgatttcagatggaaggccgttg

SEQ ID NO: 1522 - DNA, 51 bp, synthetic construct
  misc_feature 1..51: note = Synthetic Primer
  misc_difference 21..23: note = n is a, c, g, t or u
  misc_difference 27..29: note = n is a, c, g, t or u
  modified_base 20: mod_base = OTHER; note = uracil
  modified_base 33: mod_base = OTHER; note = uracil
  modified_base 36: mod_base = OTHER; note = uracil
  modified_base 38: mod_base = OTHER; note = uracil
  modified_base 42: mod_base = OTHER; note = uracil
  modified_base 49: mod_base = OTHER; note = uracil
  source 1..51: mol_type = other DNA
tgacaaggcgtagtcacggtnnnactnnntgatcctgtgcctggcaggtac

SEQ ID NO: 1523 - DNA, 50 bp, synthetic construct
  misc_feature 1..50: note = Synthetic Primer
  misc_difference 21..23: note = n is a, c, g, t or u
  misc_difference 27..29: note = n is a, c, g, t or u
  modified_base 20: mod_base = OTHER; note = uracil
  modified_base 33: mod_base = OTHER; note = uracil
  modified_base 37: mod_base = OTHER; note = uracil
  modified_base 48: mod_base = OTHER; note = uracil
  source 1..50: mol_type = other DNA
tgacaaggcgtagtcacggtnnnactnnntgatacatcgggccggagtgg

SEQ ID NO: 1524 - DNA, 51 bp, synthetic construct
  misc_feature 1..51: note = Synthetic Primer
  misc_difference 21..23: note = n is a, c, g, t or u
  misc_difference 27..29: note = n is a, c, g, t or u
  modified_base 20: mod_base = OTHER; note = uracil
  modified_base 33: mod_base = OTHER; note = uracil
  modified_base 38: mod_base = OTHER; note = uracil
  modified_base 41: mod_base = OTHER; note = uracil
  modified_base 47: mod_base = OTHER; note = uracil
  source 1..51: mol_type = other DNA
tgacaaggcgtagtcacggtnnnactnnntgatcaggtggtgaccatccct

SEQ ID NO: 1525 - DNA, 52 bp, synthetic construct
  misc_feature 1..52: note = Synthetic Primer
  misc_difference 21..23: note = n is a, c, g, t or u
  misc_difference 27..29: note = n is a, c, g, t or u
  modified_base 20: mod_base = OTHER; note = uracil
  modified_base 33: mod_base = OTHER; note = uracil
  modified_base 38: mod_base = OTHER; note = uracil
  modified_base 43..45: mod_base = OTHER; note = uracil
  modified_base 48: mod_base = OTHER; note = uracil
  source 1..52: mol_type = other DNA
tgacaaggcgtagtcacggtnnnactnnntgatgacgtggactttcgtagcc

SEQ ID NO: 1526 - DNA, 51 bp, synthetic construct
  misc_feature 1..51: note = Synthetic Primer
  misc_difference 21..23: note = n is a, c, g, t or u
  misc_difference 27..29: note = n is a, c, g, t or u
  modified_base 20: mod_base = OTHER; note = uracil
  modified_base 33: mod_base = OTHER; note = uracil
  modified_base 35..36: mod_base = OTHER; note = uracil
  modified_base 38: mod_base = OTHER; note = uracil
  modified_base 40: mod_base = OTHER; note = uracil
  modified_base 44: mod_base = OTHER; note = uracil
  modified_base 47: mod_base = OTHER; note = uracil
  source 1..51: mol_type = other DNA
tgacaaggcgtagtcacggtnnnactnnntgatcttctctgcatggtgccc

SEQ ID NO: 1527 - DNA, 52 bp, synthetic construct
  misc_feature 1..52: note = Synthetic Primer
  misc_difference 21..23: note = n is a, c, g, t or u
  misc_difference 27..29: note = n is a, c, g, t or u
  modified_base 20: mod_base = OTHER; note = uracil
  modified_base 33..34: mod_base = OTHER; note = uracil
  modified_base 40: mod_base = OTHER; note = uracil
  modified_base 42: mod_base = OTHER; note = uracil
  source 1..52: mol_type = other DNA
tgacaaggcgtagtcacggtnnnactnnntgattgcaggtatgagccagagc

SEQ ID NO: 1528 - DNA, 54 bp, synthetic construct
  misc_feature 1..54: note = Synthetic Primer
  misc_difference 21..23: note = n is a, c, g, t or u
  misc_difference 27..29: note = n is a, c, g, t or u
  modified_base 20: mod_base = OTHER; note = uracil
  modified_base 33: mod_base = OTHER; note = uracil
  modified_base 47..48: mod_base = OTHER; note = uracil
  modified_base 51..52: mod_base = OTHER; note = uracil
  source 1..54: mol_type = other DNA
tgacaaggcgtagtcacggtnnnactnnntgatgggacaaaccgccttaattca

SEQ ID NO: 1529 - DNA, 50 bp, synthetic construct
  misc_feature 1..50: note = Synthetic Primer
  misc_difference 21..23: note = n is a, c, g, t or u
  misc_difference 27..29: note = n is a, c, g, t or u
  modified_base 20: mod_base = OTHER; note = uracil
  modified_base 33: mod_base = OTHER; note = uracil
  modified_base 44..45: mod_base = OTHER; note = uracil
  modified_base 48: mod_base = OTHER; note = uracil
  source 1..50: mol_type = other DNA
tgacaaggcgtagtcacggtnnnactnnntgatgacgccgaacttcctgc

SEQ ID NO: 1530 - DNA, 50 bp, synthetic construct
  misc_feature 1..50: note = Synthetic Primer
  misc_difference 21..23: note = n is a, c, g, t or u
  misc_difference 27..29: note = n is a, c, g, t or u
  modified_base 20: mod_base = OTHER; note = uracil
  modified_base 33: mod_base = OTHER; note = uracil
  modified_base 36: mod_base = OTHER; note = uracil
  modified_base 46: mod_base = OTHER; note = uracil
  source 1..50: mol_type = other DNA
tgacaaggcgtagtcacggtnnnactnnntgatactccagcgccctggac

SEQ ID NO: 1531 - DNA, 52 bp, synthetic construct
  misc_feature 1..52: note = Synthetic Primer
  misc_difference 21..23: note = n is a, c, g, t or u
  misc_difference 27..29: note = n is a, c, g, t or u
  modified_base 20: mod_base = OTHER; note = uracil
  modified_base 33: mod_base = OTHER; note = uracil
  modified_base 37: mod_base = OTHER; note = uracil
  modified_base 41: mod_base = OTHER; note = uracil
  modified_base 48: mod_base = OTHER; note = uracil
  source 1..52: mol_type = other DNA
tgacaaggcgtagtcacggtnnnactnnntgatgggtgactggagagtcagc

SEQ ID NO: 1532 - DNA, 50 bp, synthetic construct
  misc_feature 1..50: note = Synthetic Primer
  misc_difference 21..23: note = n is a, c, g, t or u
  misc_difference 27..29: note = n is a, c, g, t or u
  modified_base 20: mod_base = OTHER; note = uracil
  modified_base 33: mod_base = OTHER; note = uracil
  modified_base 43: mod_base = OTHER; note = uracil
  modified_base 46: mod_base = OTHER; note = uracil
  source 1..50: mol_type = other DNA
tgacaaggcgtagtcacggtnnnactnnntgatccacgcaggtgatgccc

SEQ ID NO: 1533 - DNA, 50 bp, synthetic construct
  misc_feature 1..50: note = Synthetic Primer
  misc_difference 21..23: note = n is a, c, g, t or u
  misc_difference 27..29: note = n is a, c, g, t or u
  modified_base 20: mod_base = OTHER; note = uracil
  modified_base 33: mod_base = OTHER; note = uracil
  modified_base 38: mod_base = OTHER; note = uracil
  modified_base 42: mod_base = OTHER; note = uracil
  modified_base 47..48: mod_base = OTHER; note = uracil
  source 1..50: mol_type = other DNA
tgacaaggcgtagtcacggtnnnactnnntgatcacctggctccggttgg

SEQ ID NO: 1534 - DNA, 50 bp, synthetic construct
  misc_feature 1..50: note = Synthetic Primer
  misc_difference 21..23: note = n is a, c, g, t or u
  misc_difference 27..29: note = n is a, c, g, t or u
  modified_base 20: mod_base = OTHER; note = uracil
  modified_base 33..34: mod_base = OTHER; note = uracil
  modified_base 36: mod_base = OTHER; note = uracil
  modified_base 41: mod_base = OTHER; note = uracil
  modified_base 49: mod_base = OTHER; note = uracil
  source 1..50: mol_type = other DNA
tgacaaggcgtagtcacggtnnnactnnntgattatgccgtcggcggctc

SEQ ID NO: 1535 - DNA, 50 bp, synthetic construct
  misc_feature 1..50: note = Synthetic Primer
  misc_difference 21..23: note = n is a, c, g, t or u
  misc_difference 27..29: note = n is a, c, g, t or u
  modified_base 20: mod_base = OTHER; note = uracil
  modified_base 33: mod_base = OTHER; note = uracil
  modified_base 39: mod_base = OTHER; note = uracil
  modified_base 44: mod_base = OTHER; note = uracil
  source 1..50: mol_type = other DNA
tgacaaggcgtagtcacggtnnnactnnntgatgaacgtgcgctgcgagt

SEQ ID NO: 1536 - DNA, 50 bp, synthetic construct
  misc_feature 1..50: note = Synthetic Primer
  misc_difference 21..23: note = n is a, c, g, t or u
  misc_difference 27..29: note = n is a, c, g, t or u
  modified_base 20: mod_base = OTHER; note = uracil
  modified_base 33: mod_base = OTHER; note = uracil
  modified_base 41: mod_base = OTHER; note = uracil
  modified_base 43: mod_base = OTHER; note = uracil
  modified_base 45: mod_base = OTHER; note = uracil
  source 1..50: mol_type = other DNA
tgacaaggcgtagtcacggtnnnactnnntgatcagcagctgtgtgacgt

SEQ ID NO: 1537 - DNA, 51 bp, synthetic construct
  misc_feature 1..51: note = Synthetic Primer
  misc_difference 21..23: note = n is a, c, g, t or u
  misc_difference 27..29: note = n is a, c, g, t or u
  modified_base 20: mod_base = OTHER; note = uracil
  modified_base 33: mod_base = OTHER; note = uracil
  modified_base 37: mod_base = OTHER; note = uracil
  modified_base 39: mod_base = OTHER; note = uracil
  modified_base 43: mod_base = OTHER; note = uracil
  source 1..51: mol_type = other DNA
tgacaaggcgtagtcacggtnnnactnnntgatccatctccatgggcgaga

SEQ ID NO: 1538 - DNA, 51 bp, synthetic construct
  misc_feature 1..51: note = Synthetic Primer
  misc_difference 21..23: note = n is a, c, g, t or u
  misc_difference 27..29: note = n is a, c, g, t or u
  modified_base 20: mod_base = OTHER; note = uracil
  modified_base 33: mod_base = OTHER; note = uracil
  modified_base 38: mod_base = OTHER; note = uracil
  modified_base 40: mod_base = OTHER; note = uracil
  modified_base 42..43: mod_base = OTHER; note = uracil
  source 1..51: mol_type = other DNA
tgacaaggcgtagtcacggtnnnactnnntgatgccctgtcttcaaggcca

SEQ ID NO: 1539 - DNA, 55 bp, synthetic construct
  misc_feature 1..55: note = Synthetic Primer
  misc_difference 21..23: note = n is a, c, g, t or u
  misc_difference 27..29: note = n is a, c, g, t or u
  modified_base 20: mod_base = OTHER; note = uracil
  modified_base 33: mod_base = OTHER; note = uracil
  modified_base 38: mod_base = OTHER; note = uracil
  modified_base 41: mod_base = OTHER; note = uracil
  modified_base 44: mod_base = OTHER; note = uracil
  modified_base 46..47: mod_base = OTHER; note = uracil
  modified_base 50..51: mod_base = OTHER; note = uracil
  modified_base 53: mod_base = OTHER; note = uracil
  source 1..55: mol_type = other DNA
tgacaaggcgtagtcacggtnnnactnnntgatgaggtggtggtgttgcttatct

SEQ ID NO: 1540 - DNA, 50 bp, synthetic construct
  misc_feature 1..50: note = Synthetic Primer
  misc_difference 21..23: note = n is a, c, g, t or u
  misc_difference 27..29: note = n is a, c, g, t or u
  modified_base 20: mod_base = OTHER; note = uracil
  modified_base 33: mod_base = OTHER; note = uracil
  modified_base 39: mod_base = OTHER; note = uracil
  modified_base 44: mod_base = OTHER; note = uracil
  modified_base 48: mod_base = OTHER; note = uracil
  source 1..50: mol_type = other DNA
tgacaaggcgtagtcacggtnnnactnnntgatacgcctccactgagtgc

SEQ ID NO: 1541 - DNA, 50 bp, synthetic construct
  misc_feature 1..50: note = Synthetic Primer
  misc_difference 21..23: note = n is a, c, g, t or u
  misc_difference 27..29: note = n is a, c, g, t or u
  modified_base 20: mod_base = OTHER; note = uracil
  modified_base 33: mod_base = OTHER; note = uracil
  modified_base 38: mod_base = OTHER; note = uracil
  modified_base 46..47: mod_base = OTHER; note = uracil
  source 1..50: mol_type = other DNA
tgacaaggcgtagtcacggtnnnactnnntgatggcatcgccaacttcgc

SEQ ID NO: 1542 - DNA, 50 bp, synthetic construct
  misc_feature 1..50: note = Synthetic Primer
  misc_difference 21..23: note = n is a, c, g, t or u
  misc_difference 27..29: note = n is a, c, g, t or u
  modified_base 20: mod_base = OTHER; note = uracil
  modified_base 33: mod_base = OTHER; note = uracil
  modified_base 35: mod_base = OTHER; note = uracil
  modified_base 38: mod_base = OTHER; note = uracil
  modified_base 47: mod_base = OTHER; note = uracil
  modified_base 49: mod_base = OTHER; note = uracil
  source 1..50: mol_type = other DNA
tgacaaggcgtagtcacggtnnnactnnntgatctcctgcacagcgtctc

SEQ ID NO: 1543 - DNA, 50 bp, synthetic construct
  misc_feature 1..50: note = Synthetic Primer
  misc_difference 21..23: note = n is a, c, g, t or u
  misc_difference 27..29: note = n is a, c, g, t or u
  modified_base 20: mod_base = OTHER; note = uracil
  modified_base 33: mod_base = OTHER; note = uracil
  modified_base 38..39: mod_base = OTHER; note = uracil
  modified_base 47..48: mod_base = OTHER; note = uracil
  source 1..50: mol_type = other DNA
tgacaaggcgtagtcacggtnnnactnnntgatgagcttggcccgcttgc

SEQ ID NO: 1544 - DNA, 50 bp, synthetic construct
  misc_feature 1..50: note = Synthetic Primer
  misc_difference 21..23: note = n is a, c, g, t or u
  misc_difference 27..29: note = n is a, c, g, t or u
  modified_base 20: mod_base = OTHER; note = uracil
  modified_base 33: mod_base = OTHER; note = uracil
  modified_base 38: mod_base = OTHER; note = uracil
  modified_base 42: mod_base = OTHER; note = uracil
  modified_base 48: mod_base = OTHER; note = uracil
  source 1..50: mol_type = other DNA
tgacaaggcgtagtcacggtnnnactnnntgatgccctccgtgaacatgc

SEQ ID NO: 1545 - DNA, 52 bp, synthetic construct
  misc_feature 1..52: note = Synthetic Primer
  misc_difference 21..23: note = n is a, c, g, t or u
  misc_difference 27..29: note = n is a, c, g, t or u
  modified_base 20: mod_base = OTHER; note = uracil
  modified_base 33: mod_base = OTHER; note = uracil
  modified_base 48: mod_base = OTHER; note = uracil
  modified_base 51: mod_base = OTHER; note = uracil
  source 1..52: mol_type = other DNA
tgacaaggcgtagtcacggtnnnactnnntgataccccagcaagccatactt

SEQ ID NO: 1546 - DNA, 59 bp, synthetic construct
  misc_feature 1..59: note = Synthetic Primer
  misc_difference 21..23: note = n is a, c, g, t or u
  misc_difference 27..29: note = n is a, c, g, t or u
  modified_base 20: mod_base = OTHER; note = uracil
  modified_base 33: mod_base = OTHER; note = uracil
  modified_base 48: mod_base = OTHER; note = uracil
  modified_base 50: mod_base = OTHER; note = uracil
  modified_base 52..55: mod_base = OTHER; note = uracil
  modified_base 57: mod_base = OTHER; note = uracil
  source 1..59: mol_type = other DNA
tgacaaggcgtagtcacggtnnnactnnntgataacaccggaaaggatatattttctgc

SEQ ID NO: 1547 - DNA, 51 bp, synthetic construct
  misc_feature 1..51: note = Synthetic Primer
  misc_difference 21..23: note = n is a, c, g, t or u
  misc_difference 27..29: note = n is a, c, g, t or u
  modified_base 20: mod_base = OTHER; note = uracil
  modified_base 33: mod_base = OTHER; note = uracil
  modified_base 36: mod_base = OTHER; note = uracil
  modified_base 42: mod_base = OTHER; note = uracil
  modified_base 50: mod_base = OTHER; note = uracil
  source 1..51: mol_type = other DNA
tgacaaggcgtagtcacggtnnnactnnntgatcgtgggcctggcacactg

SEQ ID NO: 1548 - DNA, 51 bp, synthetic construct
  misc_feature 1..51: note = Synthetic Primer
  misc_difference 21..23: note = n is a, c, g, t or u
  misc_difference 27..29: note = n is a, c, g, t or u
  modified_base 20: mod_base = OTHER; note = uracil
  modified_base 33: mod_base = OTHER; note = uracil
  modified_base 36: mod_base = OTHER; note = uracil
  modified_base 39: mod_base = OTHER; note = uracil
  modified_base 50: mod_base = OTHER; note = uracil
  source 1..51: mol_type = other DNA
tgacaaggcgtagtcacggtnnnactnnntgatggtggtgagcagcaggtt

SEQ ID NO: 1549 - DNA, 54 bp, synthetic construct
  misc_feature 1..54: note = Synthetic Primer
  misc_difference 21..23: note = n is a, c, g, t or u
  misc_difference 27..29: note = n is a, c, g, t or u
  modified_base 20: mod_base = OTHER; note = uracil
  modified_base 33: mod_base = OTHER; note = uracil
  modified_base 42..43: mod_base = OTHER; note = uracil
  modified_base 45: mod_base = OTHER; note = uracil
  source 1..54: mol_type = other DNA
tgacaaggcgtagtcacggtnnnactnnntgatccagggcattgtgcacaagga

SEQ ID NO: 1550 - DNA, 51 bp, synthetic construct
  misc_feature 1..51: note = Synthetic Primer
  misc_difference 21..23: note = n is a, c, g, t or u
  misc_difference 27..29: note = n is a, c, g, t or u
  modified_base 20: mod_base = OTHER; note = uracil
  modified_base 33: mod_base = OTHER; note = uracil
  modified_base 44: mod_base = OTHER; note = uracil
  modified_base 50: mod_base = OTHER; note = uracil
  source 1..51: mol_type = other DNA
tgacaaggcgtagtcacggtnnnactnnntgatcagaggcccctcggagtg

SEQ ID NO: 1551 - DNA, 50 bp, synthetic construct
  misc_feature 1..50: note = Synthetic Primer
  misc_difference 21..23: note = n is a, c, g, t or u
  misc_difference 27..29: note = n is a, c, g, t or u
  modified_base 20: mod_base = OTHER; note = uracil
  modified_base 33: mod_base = OTHER; note = uracil
  modified_base 37: mod_base = OTHER; note = uracil
  modified_base 39: mod_base = OTHER; note = uracil
  modified_base 48..49: mod_base = OTHER; note = uracil
  source 1..50: mol_type = other DNA
tgacaaggcgtagtcacggtnnnactnnntgataggtgtccaggccgttg

SEQ ID NO: 1552 - DNA, 50 bp, synthetic construct
  misc_feature 1..50: note = Synthetic Primer
  misc_difference 21..23: note = n is a, c, g, t or u
  misc_difference 27..29: note = n is a, c, g, t or u
  modified_base 20: mod_base = OTHER; note = uracil
  modified_base 33: mod_base = OTHER; note = uracil
  modified_base 37: mod_base = OTHER; note = uracil
  modified_base 41: mod_base = OTHER; note = uracil
  modified_base 46..47: mod_base = OTHER; note = uracil
  source 1..50: mol_type = other DNA
tgacaaggcgtagtcacggtnnnactnnntgatgcgtagctccccttccc

SEQ ID NO: 1553 - DNA, 55 bp, synthetic construct
  misc_feature 1..55: note = Synthetic Primer
  misc_difference 21..23: note = n is a, c, g, t or u
  misc_difference 27..29: note = n is a, c, g, t or u
  modified_base 20: mod_base = OTHER; note = uracil
  modified_base 33: mod_base = OTHER; note = uracil
  modified_base 42: mod_base = OTHER; note = uracil
  modified_base 46..48: mod_base = OTHER; note = uracil
  modified_base 50: mod_base = OTHER; note = uracil
  source 1..55: mol_type = other DNA
tgacaaggcgtagtcacggtnnnactnnntgatcccaaccctacatttctgcaca

SEQ ID NO: 1554 - DNA, 50 bp, synthetic construct
  misc_feature 1..50: note = Synthetic Primer
  misc_difference 21..23: note = n is a, c, g, t or u
  misc_difference 27..29: note = n is a, c, g, t or u
  modified_base 20: mod_base = OTHER; note = uracil
  modified_base 33: mod_base = OTHER; note = uracil
  modified_base 39: mod_base = OTHER; note = uracil
  modified_base 49: mod_base = OTHER; note = uracil
  source 1..50: mol_type = other DNA
tgacaaggcgtagtcacggtnnnactnnntgatcagcctcggccccactg

SEQ ID NO: 1555 - DNA, 50 bp, synthetic construct
  misc_feature 1..50: note = Synthetic Primer
  misc_difference 21..23: note = n is a, c, g, t or u
  misc_difference 27..29: note = n is a, c, g, t or u
  modified_base 20: mod_base = OTHER; note = uracil
  modified_base 33: mod_base = OTHER; note = uracil
  modified_base 35: mod_base = OTHER; note = uracil
  modified_base 40: mod_base = OTHER; note = uracil
  modified_base 47: mod_base = OTHER; note = uracil
  source 1..50: mol_type = other DNA
tgacaaggcgtagtcacggtnnnactnnntgatctcccgtgggacatcct

SEQ ID NO: 1556 - DNA, 51 bp, synthetic construct
  misc_feature 1..51: note = Synthetic Primer
  misc_difference 21..23: note = n is a, c, g, t or u
  misc_difference 27..29: note = n is a, c, g, t or u
  modified_base 20: mod_base = OTHER; note = uracil
  modified_base 33..34: mod_base = OTHER; note = uracil
  modified_base 37: mod_base = OTHER; note = uracil
  modified_base 43: mod_base = OTHER; note = uracil
  source 1..51: mol_type = other DNA
tgacaaggcgtagtcacggtnnnactnnntgattcctccaagtacggcacc

SEQ ID NO: 1557 - DNA, 50 bp, synthetic construct
  misc_feature 1..50: note = Synthetic Primer
  misc_difference 21..23: note = n is a, c, g, t or u
  misc_difference 27..29: note = n is a, c, g, t or u
  modified_base 20: mod_base = OTHER; note = uracil
  modified_base 33: mod_base = OTHER; note = uracil
  modified_base 41: mod_base = OTHER; note = uracil
  modified_base 45: mod_base = OTHER; note = uracil
  modified_base 47: mod_base = OTHER; note = uracil
  source 1..50: mol_type = other DNA
tgacaaggcgtagtcacggtnnnactnnntgatcgcagcatgactgtggt

SEQ ID NO: 1558 - DNA, 50 bp, synthetic construct
  misc_feature 1..50: note = Synthetic Primer
  misc_difference 21..23: note = n is a, c, g, t or u
  misc_difference 27..29: note = n is a, c, g, t or u
  modified_base 20: mod_base = OTHER; note = uracil
  modified_base 33: mod_base = OTHER; note = uracil
  modified_base 45: mod_base = OTHER; note = uracil
  modified_base 49: mod_base = OTHER; note = uracil
  source 1..50: mol_type = other DNA
tgacaaggcgtagtcacggtnnnactnnntgatggcggccagcctcactg

SEQ ID NO: 1559 - DNA, 50 bp, synthetic construct
  misc_feature 1..50: note = Synthetic Primer
  misc_difference 21..23: note = n is a, c, g, t or u
  misc_difference 27..29: note = n is a, c, g, t or u
  modified_base 20: mod_base = OTHER; note = uracil
  modified_base 33: mod_base = OTHER; note = uracil
  modified_base 35: mod_base = OTHER; note = uracil
  modified_base 40: mod_base = OTHER; note = uracil
  modified_base 49: mod_base = OTHER; note = uracil
  source 1..50: mol_type = other DNA
tgacaaggcgtagtcacggtnnnactnnntgatctcagctgcgccgcctc

1. A composition for a single stream multiplex determination of actionable oncology biomarkers in a sample, the composition comprising a plurality of sets of primer pair reagents directed to a plurality of target sequences to detect low level targets in the sample, wherein the target sequences are selected for target genes that are selected from the group consisting of the following function: DNA hotspot mutation genes, copy number variation (CNV) genes, inter-genetic fusion genes, and intra-genetic fusion genes selected from the genes of Table 1.

2. The composition of claim 1, wherein one or more actionable oncology biomarkers in the sample determines a change in oncology activity in the sample indicative of a potential diagnosis, prognosis, candidate therapeutic regimen, and/or adverse event.

3. The composition of claim 1, wherein the target genes comprise the genes of Table 1.

4. The composition of claim 1, wherein the target genes consist of the genes of Table 1.

5. The composition of claim 1, wherein the plurality of target sequences comprises the amplicon sequences detected by the primers from Table A.

6. The composition of claim 1, wherein the plurality of target sequences comprises each of the amplicon sequences detected by the primers from Table A.

7. The composition of claim 1, wherein the plurality of primer reagents is selected from the primers of Table A.

8. The composition of claim 1, wherein the plurality of primer reagents comprises each of the primers of Table A.

9. A test kit comprising the composition of claim 1.

10. A method for determining the presence of one or more actionable oncology biomarkers in a biological sample, comprising:
multiplex amplification of a plurality of target sequences from a biological sample; and
detecting each of the plurality of target sequences;
wherein amplifying comprises contacting at least a portion of the sample with the composition of claim 1 and a polymerase under amplification conditions, thereby producing amplified target sequences, and wherein detection of one or more actionable oncology biomarkers as compared with a control sample determines a change in oncology activity in the sample indicative of a potential diagnosis, prognosis, candidate therapeutic regimen, and/or adverse event.

11. The method of claim 10, wherein the target sequences are selected for target genes that are selected from the group consisting of the following function: DNA hotspot mutation genes, copy number variation (CNV) genes, inter-genetic fusion genes, and intra-genetic fusion genes selected from the genes of Table 1.

12. The method of claim 10, wherein the target genes comprise the genes of Table 1.

13. The method of claim 10, wherein the target genes consist of the genes of Table 1.

14. The method of claim 10, wherein the plurality of target sequences comprises the amplicon sequences detected by the primers from Table A.

15. The method of claim 10, wherein the plurality of target sequences comprises each of the amplicon sequences detected by the primers from Table A.

16. The method of claim 10, wherein the plurality of primer reagents is selected from the primers of Table A.

17. The method of claim 10, wherein the plurality of primer reagents comprises each of the primers of Table A.

18. The method of claim 10, wherein the biological sample and the control sample are from the same individual.

19. The method of claim 10, wherein the control sample is a sample with known mutations.

20. The method of claim 10, wherein the sample is isolated from the same source or from the same subject at different time points.
